United States Patent Application Publication US 2012/0117867 A1 - sequence listing, part 2

SEQ ID NO: 3219 - DNA, 3315 bp, Cryptococcus neoformans var. neoformans B-3501A
  CDS (1)..(3315)
atgctccctcttagagcgttcgcccgcctcgcccagcgcccccgtctctctcggccgacgcagctcgcccgatcatccctcccccgtccatctccctcccggcccgccgcccactacctcgccctcgccccggcgccctccaccaggttcctccacagctctccccccgttctcaaggaaaagcggtggctcaacaacacccctcccgaggacgatggtgaagacggccaaaatcccaaacaggatgaccaggttgagaagcctctccctgatgcagaatcatccaaatccgctgaagaacgggccaaatcccagtcctcaaaacctgacataaaagcatcatccagtgattccgtgtcatcctctgcccccgcccctggatctgcagatggtgggtcgcctcctggtgcaggtggcccgaaagaagttgcaaaacctgtcattcctgagatatacccccaagtcctcgccatccccatcactcaccgtcctctctttcctgggttctataaggcagtaaccgtccgatctccacctgttatcaaagcaattcgagaactacaggcacatggtcagccatacgttggcgcgttcttgttaaaggactccactgtcgattccgatgtcgtaactgatatcaaccaggtgcagcctgttggagttttttgccagatcacaagttgcttcacttcccaagagggagaaggcaagccagaggctctaacagctgtgcttttcccgcacaggaggatcaaaattaatgaactcgtgaaaagttcggggacaaaaggagatgggaccgttggcgttggtggtctggtagaagggagccaggactctgcaaagggtgagggtgaagtgaagagttttgaatcagaagtgccgggtgttgaggaagtgcgggaggagctggggaccgtttccattgacagcgagcagccggatgtgcataaagaaaaccgagacctggagacaaaagaggtgactcagattgatttcttgcactctcttctaccccaagtctctcttacaaacgttagcaacttgagcactgagccctacgaaaaagattcacaggtgatccgggcgataatgagcgagttgatttctgtcttcaaggagattgctcaacttcaacccatgttccgggaacaagtcacgagctttgcgatctcaaacacttcttctcaagtctttgacgagcccgacaagttggccgatctcgcagctgtagtatccaccgcggacgtatccgacctgcaagctgttctttcctcgacatcgatcgaagatcgcctccagcgcgccctcgtgcttctcaaaaaggagctcatcaatgcccaactgcaatttaagatctcccgcgacgtagacaccaaaatacaaaaaagacagagagaatattacttgatggaacagctcaaaggcataaaaaaagagttgggtatggagagcgatggaaaggacaagctcgtggaagggtttaaggaaaaagcaagcaagttggccatgccggaaggtgtgcgaaaggtatttgacgaggagttgaacaaactcgttcatctcgaaccagctgcgagcgaattcaatgtcactcgaaattacatagactggcttactcaagtaccttggggtgtacatacacctgagaattacaatatttctcacgccatcaaaatcctcgatgaggatcattatggcctcaaagacgtcaaagaccgaattctcgagtttatggccatagggaagcttcgtgggtctgtagagggcaaaattctttgtctcgttgggccacctggtgtaggtaaaaccagtattggcaagagcatagcgaaggctcttggtagacagtttttcaggttttcggtcggtggcttgacagatgtcgctgagatcaaggggcacaggcgaacctatatcggtgccatgcccggcaaacctatccaagcgctcaaaaaggttgccactgaaaatcctctcattttgattgatgaagtcgacaaaatcagcaaggcgtacaacggcgatcctgcgagtgctttgcttgaaatgcttgaccccgagcaaaacaaatcctttttggaccattatttggatgtccctatcgatctttctaaggttctctttgtctgcactgccaacgtactggaaaccatcccgggtcctctgttggaccgaatggaagtgttagaagtatctggttatgtttcagcagagaagatgaacattgccgaacgatatttgtcgcctcaagctaaagtagcggcggggttggaggatgtcaacattgaattagaacccggggcgattgaggcattaatcaggtactactgccgagagagtggtgttcgtaatctgaagaagcacattgacaaaatttaccgtaaagcagccttcaaaattgtaaccgaccttggagaatcgggtcttcctgaacccgcaacgccgcctgccgagaatcaagtcgaggctcaatatcctgatatcaaacctgcttctgaattaacctccaatgtcatcccgggaaccgaggttagtggagtggataccaaaacggatgtaacgactgtgccaagggaacctatgaaagtgcctgctggcatacatgtcaaggttacacaagagaatctgaaggactatgtcgggccacctctctaccataaggacaggctttacacccactcgcctcctgcaggtgtgagtactggtctggggtatcttggtaatggctctggcgcggtcatgcccgttgagattaactccatgcccggcaaaggaaaccttcaattgaccggtaaacttggagaagtgattagagaatccgcgcaaatcgccatgtcctgggtcaagtccaatgcttatctgctaggcatcacaaagtcagaagctgaagccaccttgaacgatcgagacgtgcacttacacatgccggagggtggtattggaaaggagggtccatcagccggtacggctatcctgacagctttcgtctcgttgttcaccaaaacacgagtggacccagatattgctatgacgggtgagatcagtttgcttggacaggtgttgcctgttggaggcctcaaggagaaaattttagccgcacaccgggctggtattaaaaagctcatcgttcctgcgggatgtaaaccagacattgacgagaacgttccagagtccgtcaagggcggaatcgaatttgttttcgttgaagatgtgcgacaagttctgcatgaagcgttccggggaacggaagtggagaagagatggcaggagacgcttccaatggaagaagagccccaaagagaaagacattag

SEQ ID NO: 3220 - protein, 1104 aa, Cryptococcus neoformans var. neoformans B-3501A
MLPLRAFARLAQRPRLSRPTQLARSSLPRPSPSRPAAHYLALAPAPSTRFLHSSPPVLKEKRWLNNTPPEDDGEDGQNPKQDDQVEKPLPDAESSKSAEERAKSQSSKPDIKASSSDSVSSSAPAPGSADGGSPPGAGGPKEVAKPVIPEIYPQVLAIPITHRPLFPGFYKAVTVRSPPVIKAIRELQAHGQPYVGAFLLKDSTVDSDVVTDINQVQPVGVFCQITSCFTSQEGEGKPEALTAVLFPHRRIKINELVKSSGTKGDGTVGVGGLVEGSQDSAKGEGEVKSFESEVPGVEEVREELGTVSIDSEQPDVHKENRDLETKEVTQIDFLHSLLPQVSLTNVSNLSTEPYEKDSQVIRAIMSELISVFKEIAQLQPMFREQVTSFAISNTSSQVFDEPDKLADLAAVVSTADVSDLQAVLSSTSIEDRLQRALVLLKKELINAQLQFKISRDVDTKIQKRQREYYLMEQLKGIKKELGMESDGKDKLVEGFKEKASKLAMPEGVRKVFDEELNKLVHLEPAASEFNVTRNYIDWLTQVPWGVHTPENYNISHAIKILDEDHYGLKDVKDRILEFMAIGKLRGSVEGKILCLVGPPGVGKTSIGKSIAKALGRQFFRFSVGGLTDVAEIKGHRRTYIGAMPGKPIQALKKVATENPLILIDEVDKISKAYNGDPASALLEMLDPEQNKSFLDHYLDVPIDLSKVLFVCTANVLETIPGPLLDRMEVLEVSGYVSAEKMNIAERYLSPQAKVAAGLEDVNIELEPGAIEALIRYYCRESGVRNLKKHIDKIYRKAAFKIVTDLGESGLPEPATPPAENQVEAQYPDIKPASELTSNVIPGTEVSGVDTKTDVTTVPREPMKVPAGIHVKVTQENLKDYVGPPLYHKDRLYTHSPPAGVSTGLGYLGNGSGAVMPVEINSMPGKGNLQLTGKLGEVIRESAQIAMSWVKSNAYLLGITKSEAEATLNDRDVHLHMPEGGIGKEGPSAGTAILTAFVSLFTKTRVDPDIAMTGEISLLGQVLPVGGLKEKILAAHRAGIKKLIVPAGCKPDIDENVPESVKGGIEFVFVEDVRQVLHEAFRGTEVEKRWQETLPMEEEPQRERH

SEQ ID NO: 3221 - DNA, 2799 bp, Tribolium castaneum (red flour beetle)
  CDS (1)..(2799)
atgtcgcatttatcgcgtgttttcctccactcgcgtgatttgcctcgttttttaggacatttccgcgcgcgaagaagttttcacgcgtgtgtaacaacaaacttaaccacactttcgcacaccgctttagaccccgtgtccaaagtctttcctttggatttacccaagaagagcttttcgaaattgcctcgaaagacctttaatggggcggcgaccggaagtgtgcgttttttcagttcgaaggacgactcagatggggaaaagccccccgaggaggagccctacaacacccagttgccggccactgtggccgtccccgaggtctggccccacgtgcctgtcattgccattagtcgcaatatagtttttccacgttttattaaactaatcgagctcactaatccgcaattaatcgagttgataaggcgcaaagttaagttaaatcaaccgtattgtgggattttcctcaagaaaaatgaggaaaacgatgctgaagttgttaacaacattaatgatgtttacaatgttggggttttcgcccaaattcatgaaatgcaggacttgggggatcgtttgagactcgtagttatggcccatcgtagaattaaaatcacggggcaaatcatagacaacgaccaggacggaattaaagaggaagctgacgcggaaaaacggcgcagaaaacccgcccgaaataaccgcgttaaaaaaacagaaaccaaaacacctgacgataaaaaagagcccccgaaagagcagttcttaatggccgaagtcgagaacgtcatgcacaacaaattcaaacaaaccgaggaggtcaaagctttgactcaggaagttattaaaacaattcgtgatattattagtttaaatcctctgtatcgggacagtttgcaacaaatgatgcatcaggggcagagagtggtcgataatccggtttatttgagcgacttgggggccgctctcacggccgcggaagcgaaggaattacaggaagttttagaggagatggatattccaaaacgcctaatgttgtcactctcactgctcaaaaaagagtacgagctgtcgaagttgcaacaaaaaatcgggaaagaagtcgaggaaaaggtgaagcaacaccaccgaaagtacatccttcaggaacaactcaaagtgattaagaaagaattgggcttggagaaggaggataaagacgcggtaggtgacaaattccgggagagaatcaaagataaagtcttgccggaagccgtcaactccgtaattgaggaagaattaaacaaactcaatttcttggaaagtcacagttcggagtttaatgtcacgcggaactacctcgactggttgacgtcactgccttggggggtttacagcgaggagaatttaaatttgcaaagagcgtcggaaattctagatcaggatcattacggaatggaggatattaaacgacgcattttggaatttatcgccgttagtcagttaaaaggttcgactcaagggaaaattttgtgtttccatggacctcccggtgtcggaaaaactagcatcgccaggtcgatcgcgcgtgccttgaaccgggagtattttaggttttcggtgggtggtatgaccgatgtggccgaaattaagggccataggaggacctacgtgggggccatgcccggaaaagtcatccagtgtttgaagaaaacgcgcaccgaaaatcccctaattctcattgatgaggtcgacaagatcggcaagggatacaccggcgacccgagttcggccctcctcgaacttctggacccggaacaaaatgcgaatttcctcgaccattacctcgatgttccggttgatttatccaaagtattgttcatttgtactgcgaacgttgtcgagaccattcccgagcctttgcgcgaccgtatggaaatgatagatatgtcgggttacgtagcagaggagaaactcgcaattgcgaccaaatacctcctgccacaagcaatgaaagatagcggtttgaacgaccaacatatcaaaatcgacgacgaggccctaaacaccctcatcaagagttactgtcgcgaatcaggcgttcgaaacttgcagaaacacatcgagaaagtggtccgaaaagttgcctacaaagtcgtgaaagaagaaacgaactttgtcgaggtctccaatgcgaatttggccgagtttgtgggcaaaccggtgttttcgcaagagaggatgtaccccacgacgcccccgggggtcgtcatggggctggcgtggactgctatgggggggtcaactctctacattgagaccacaacgcgcaaaattgcagcagagaaggagacagacgggtctttggaattaacggggcatttgggggacgttatgaaagaatcggccaaaatcgccctgactgtggccaggaattatctctacaaaatagacagcactaataaatttttgcaaagtagtcatttacacttgcatgtgccggaaggcgcaacgccgaaagatggccctagtgcgggttgtacaattgtcactgctttgttatcgctggctaagaatgaaccaatcaggcaggatgtagcaatgacgggggagatttcactgacggggaaggttttaccggtcggagggattaaagaaaagacaattgcggccaaaagatctggagtcaagtgtataatactgccagaggaaaacaagaaagatttcaatgatcttccgaaatttatcaccgacgggttggaagtacatttcgttagtacttacgacgaggtttataatattgtttttaataaaaatctttga

SEQ ID NO: 3222 - protein, 932 aa, Tribolium castaneum (red flour beetle)
MSHLSRVFLHSRDLPRFLGHFRARRSFHACVTTNLTTLSHTALDPVSKVFPLDLPKKSFSKLPRKTFNGAATGSVRFFSSKDDSDGEKPPEEEPYNTQLPATVAVPEVWPHVPVIAISRNIVFPRFIKLIELTNPQLIELIRRKVKLNQPYCGIFLKKNEENDAEVVNNINDVYNVGVFAQIHEMQDLGDRLRLVVMAHRRIKITGQIIDNDQDGIKEEADAEKRRRKPARNNRVKKTETKTPDDKKEPPKEQFLMAEVENVMHNKFKQTEEVKALTQEVIKTIRDIISLNPLYRDSLQQMMHQGQRVVDNPVYLSDLGAALTAAEAKELQEVLEEMDIPKRLMLSLSLLKKEYELSKLQQKIGKEVEEKVKQHHRKYILQEQLKVIKKELGLEKEDKDAVGDKFRERIKDKVLPEAVNSVIEEELNKLNFLESHSSEFNVTRNYLDWLTSLPWGVYSEENLNLQRASEILDQDHYGMEDIKRRILEFIAVSQLKGSTQGKILCFHGPPGVGKTSIARSIARALNREYFRFSVGGMTDVAEIKGHRRTYVGAMPGKVIQCLKKTRTENPLILIDEVDKIGKGYTGDPSSALLELLDPEQNANFLDHYLDVPVDLSKVLFICTANVVETIPEPLRDRMEMIDMSGYVAEEKLAIATKYLLPQAMKDSGLNDQHIKIDDEALNTLIKSYCRESGVRNLQKHIEKVVRKVAYKVVKEETNFVEVSNANLAEFVGKPVFSQERMYPTTPPGVVMGLAWTAMGGSTLYIETTTRKIAAEKETDGSLELTGHLGDVMKESAKIALTVARNYLYKIDSTNKFLQSSHLHLHVPEGATPKDGPSAGCTIVTALLSLAKNEPIRQDVAMTGEISLTGKVLPVGGIKEKTIAAKRSGVKCIILPEENKKDFNDLPKFITDGLEVHFVSTYDEVYNIVFNKNL

SEQ ID NO: 3223 - DNA, 3297 bp, Pichia angusta
  CDS (1)..(3297)
atgttttcttgctcaagacgagtttttagaggccgtcttgtgcgcagcgcgtgtacccggcttgcgagcacggtccacaaccagtatgctaaaccattgctaggcaaagaggctgcactctgggtcaacgcggacgggatagactttgtgcctccttctgtggcaggcgagttgttcgacctaaagtcgaaaaggaacgagcccgatccgaaggacgagtctaaaaggaaagacaaggacaaaaaggaggacgaaaaggacaagccagacaacaagacaccgagaccttcgaaaccacggacccttgccccctctgcgggatctggcgttgctgctggcgccaacggcgccagtgggtcagcaggagctccaggcaactccggttcggacgacgatcctgcagatgaggagtcgtcggtcaacagtccggccacagtcgaactgccggagatttatccacctattattggtttgcctatctcgagaagacctctgttccctggattctacagatctgtgatcattaccgacgtgaacgttatcaaggccgtcaaggaggccacgtccacacagtatcctttcattggctgtttcctgttcaaagacgagaacatggaaggagacgtgatcaattcgaaagacgaggtgtacagcaccggtgtgctggcacaaatcacgtccaacgtgtataccagggatacagagaccggagtggagactttaacgaccgtgttgttccctcacaagcggatcaagatcgacgagttgttcgttccgaatgtttcgaagagcaaacacagttttgtcaaggtgtccaccacggaggtcgacgagtcggcagataagcagataatcgagggaataaccggcgagaaggagggcgacgagccaaagtctccgtcggaagtcatcaagtccagcgacgaggaggttatcattgacgaggacgacgagtacaaccctactgcgtttctcaaaaaatacccaatcagtctggtcaatgtttctaatgtcgaggacgagccgtatccggacagagacccaagagttaactcgttgactgccattacccttgagacgctgagagagatcaccaagctcaacaaaccgttcagtgaccagttgctttactttatcagctcattgaagggcgatgtgtatcaccatccggagagactggcagattatgctgccgccgttgctgccgccactccacaggagctgcaggacgtgatggactgcaccaacatccctgacagactcgataaagctttgaatttgctacggaaggaactgatgaacaaagaactgcagaaacagatagagcgggacctcgaggagaggatggccaagagacaccgcgaattcaatctccaggagcagctcaagtggataaagaaagagctgggaattgacgacggcagagacaagctgattgccaagtacaacgaacgcgcgtccaagctaaagttccctgaagaggtgcagaaggttttccaggaggagatcaacaagcttcagactctggagccgctgatggctgagtacgctgtgaccagaaactacctggactggctgacccagttgccatgggggctgcaatcgaaagacaggtacgatctcaagattgcgaaacaaattctggacgaggaccattacggtctgaaagaggtcaaggaccggatcttggagtttattgctgttggcaagcttctcaacaagatcaacggtaagattatctgttttgttggtcctccaggtgttggtaagacgtccattggtaagtccattgccagagcactgaacaggaaattctacagattttctgtcggcggattgacggacgtggctgagatcaagggtcacagaagaacctatgttggtgccattcctggtcgcatggtgcaggctctgaaaaacacagaaacagagaatccgcttgttttgatcgatgagatcgacaagatctcacacacccaccacggcagcggtggcgacccttctgcagcactgctggagctgcttgatcctgagcagaatggaacgttcatggactactacatggacgttccaatcaacctctcccgcgtgctgtttgtgtgcacagctaacactcttagcacaattcctgccccattgctggatcgtatggaagtgatagagattgccgggtacgttgaggacgagaagatcaagattgccgaaaactacctcgctccgtctgcaaaggaaacgtcgggcctgaccgacgtggacatctctttgagagaggacactttgcaggagctaatcagaggttactgtcgtgaaagcggagtgagaaacctcaagaaacagattgagaagatattcagaaaagccgcattgaaggtggtgaaggacgttgatggcgttgatttcgacaagaacgagaaggttgagcaaaatgagcaagccaaggagactgcaaaaaccacagagtctgagaattctatggcagaggcctccgagaaaaacgaagacaaggacgaggccaaagaagagtccaaggacgaggccaaggaagaggaagacgttccgaaggtggttgttccggaagggtacaagatcgaggtgactccagacaatctcaaagactacgtggggtcccctgtttacactgcagaccgactatacgagaagacaccgccgggtgtggtcatgggtcttgcatggacccagactggagggtcagctctgtacattgagtcgatcattgagcacgccatcaacaaggactcgacgcctaagctagagcgcacgggtcaacttggagacgtgatgaaggagtctgtgcgcatcgcgtactcgttctccaagatgtatcttgccaagaagttcgcggaaaaccggttcttcgatcgtgcccagatccacctgcattgtcctgagggggctacaccaaaggatggaccttctgccggcgttgccatcacgtcgtcgttcctttcgcttgctctgaacaagcctttaagacccgacattgccatgactggagaactcacactgacaggacgcgtgctgcgtatcggtggcctcaaggagaagacgcttgctgcgcgaaggtctggtgtgaacacggtcatcttccctaaggacaaccttgcggactggaacgaactgcaggacaacgtcaaggagggcatcacgccggtgcctgttgagtggtatgacgaggtgtttgcgacgctctttggcgacgtgactgctgacgagggcaacgcagtctggaagaaggagtttgagctcatcgaccaagccgagaaggacaagaaatga

SEQ ID NO: 3224 - protein, 1098 aa, Pichia angusta
MFSCSRRVFRGRLVRSACTRLASTVHNQYAKPLLGKEAALWVNADGIDFVPPSVAGELFDLKSKRNEPDPKDESKRKDKDKKEDEKDKPDNKTPRPSKPRTLAPSAGSGVAAGANGASGSAGAPGNSGSDDDPADEESSVNSPATVELPEIYPPIIGLPISRRPLFPGFYRSVIITDVNVIKAVKEATSTQYPFIGCFLFKDENMEGDVINSKDEVYSTGVLAQITSNVYTRDTETGVETLTTVLFPHKRIKIDELFVPNVSKSKHSFVKVSTTEVDESADKQIIEGITGEKEGDEPKSPSEVIKSSDEEVIIDEDDEYNPTAFLKKYPISLVNVSNVEDEPYPDRDPRVNSLTAITLETLREITKLNKPFSDQLLYFISSLKGDVYHHPERLADYAAAVAAATPQELQDVMDCTNIPDRLDKALNLLRKELMNKELQKQIERDLEERMAKRHREFNLQEQLKWIKKELGIDDGRDKLIAKYNERASKLKFPEEVQKVFQEEINKLQTLEPLMAEYAVTRNYLDWLTQLPWGLQSKDRYDLKIAKQILDEDHYGLKEVKDRILEFIAVGKLLNKINGKIICFVGPPGVGKTSIGKSIARALNRKFYRFSVGGLTDVAEIKGHRRTYVGAIPGRMVQALKNTETENPLVLIDEIDKISHTHHGSGGDPSAALLELLDPEQNGTFMDYYMDVPINLSRVLFVCTANTLSTIPAPLLDRMEVIEIAGYVEDEKIKIAENYLAPSAKETSGLTDVDISLREDTLQELIRGYCRESGVRNLKKQIEKIFRKAALKVVKDVDGVDFDKNEKVEQNEQAKETAKTTESENSMAEASEKNEDKDEAKEESKDEAKEEEDVPKVVVPEGYKIEVTPDNLKDYVGSPVYTADRLYEKTPPGVVMGLAWTQTGGSALYIESIIEHAINKDSTPKLERTGQLGDVMKESVRIAYSFSKMYLAKKFAENRFFDRAQIHLHCPEGATPKDGPSAGVAITSSFLSLALNKPLRPDIAMTGELTLTGRVLRIGGLKEKTLAARRSGVNTVIFPKDNLADWNELQDNVKEGITPVPVEWYDEVFATLFGDVTADEGNAVWKKEFELIDQAEKDKK

SEQ ID NO: 3225 - DNA, 2946 bp, Oryza sativa subsp. indica
  CDS (1)..(2946)
atgctgcgcgccgcggccgccaccaccgccgggttcctcccgccgcgtctggccgccgagacggcgcccgcggcaagggttgtggcggcggcgggtgccgaggtgaggtcgtcgccgctcctcagggctctaggggtgccgagaggcggcgccggcattgggagcgccacgccggggaggaggatgtacttcgcctccggctccgactcctccggaagcgccgccgacagcgactcggaggcgtcgtccgccgctggcgctggggaggaggagagcgagggcaacaggtcgtcctccgctgtcgctcccgccattatccgacccgaggactgccacacggtcatagctttgcctttgccacatcagccactatttccaggattttttatggcaatgtctgtaaaggatccgaagttgttgaaagctttagttgaaaaccacaaaagatctttcccatatgctggggcctttcttgtcaagaatgaggaagatactgacagtaacactgtcacacgttcagatccaaagaaaagcattcatggtctgaaagggaaagaattattgaagcatcttcatgaaattggcactcttgctaagataacaagcattcaaggagatcaggtgttgctacttggtcactgccgtttacggataactgaaatggttgaggaggacccacttacagttaaagttgaccatctaaagcatatggttgatttcaactaccaaagactagcagattttggcgctgctatttcagtcaccaacaagttgctatgccagggagttcttgaggaactagatgtgtcgaagcgtttgatgttgacccttgaattagtaaagagggaattggagattactaagttgcagcaatccatagcaaaaacaattgaagaaaaaataactggagagcagcgccgctacttattgaatgagcaacttaaagcaatcaagaaggagctaggcttggagactgatgataaaacagcgttgtcagaaaaatttaggaaaaggattgaatcgagaaaagagaaatgcccatctcatatcttacaagtcattgaagaagagctcactaaacttcaattactggaagctagttctagcgagttcagtgttaccagcaattatttagactggctaacagtattgccatggggggattacagtgatgaaaactttgatgttcttcgtgctcaacgcattcttgatgaagatcactatggtctaactgatgtaaaagaaagaatattggagtttatagcagttggaaaattaagaggaagctcacaaggtaaaattatatgtctctgtggaccacctggcgttggtaaaactagtattggacgatcagttgcacgtgcattaaaccggaagttctacagattttctgttgggggtttgtctgatatagcagaaatcaagggtcatcgacggacctatgttggggcaatgccagggaagatggttcagtgtctgaaatcagtcggaacttcaaatcctctggttttgatagatgagatcgacaagctagggagagggtattctggtgatccagccaatgcactgttggaacttcttgatcctgaacagaatgctaactttcttgatcattatcttgatgttcctattgacctctccaaggttctgtttgtttgcactgcaaatgtcatagagatgataccaggccctctactggacaggatggagatcattactattgccggttatataaccgatgagaagatgcatattgcacgggattacctagaaaagaacacaagggaggcttgtggcatcatgcctgaacaggttgaggttacggatagtgctcttcttgctcttattgaaaactattgccgggaagccggtgtgcgtaaccttcaaaaacagattgaaaaagtttaccggaagatagctctgcaacttgttcgtcaaggggtatcaaatgagccagctcgggagatcacattggtggaaccaagtgaacaacctactggtgttagcattgcaacagaagtggaaaacaagagccagagggacagtcttgcagaagatgtttcagtgcatgttattccaactgatttttcttgtgagaagattaatgtagtatccttaacaaccaagtcagaagtagaccactacgagcatccaaaaggagtatctaaagaaacttctgcagatgacaaagctacaccaacgaatacatcaggcaaaatggaggccaatgaacacacagaggaagtaatggaagcacttgtagatgaagcacttgtagacaagactgtggagaaagtagttgttgatgcatcaaatctggataactttgttgggaaggctgtattccaaccagagcgtatatacgatcaaactcctgttggggtagtcatgggtttagcttggaatgctatgggtggttctaccttgtatattgagacagcaaaagttgaggacggcgaaaaaaaaggtgcacttgtggtgacaggccagcttggagatgtcatgaaagagagtgctcaaattgcacatacaatttgcagatctatattacatgagaaagaaccaaataacaccttttttacaaagtcaaagcttcacttacatgttcctgcaggggctactccaaaggatggccccagtgctggatgcacgatggttacatcgatgctgtctttagccatgggaaagctggtaaagaaagacctcgcaatgactggggaagtaacattgactggacgaattctcccaattggtggggtgaaggagaaaaccatcgctgccaggagaagtgggataaagacgatcatattcccagcagcgaacagaagagatttcgacgagcttgctcctaatgtaaaagaaggtcttgaagtccactttgttgacaaatacagtgaaatatatgatttagcttttccaagtgatagtcaggcattagcaagctag

SEQ ID NO: 3226 - protein, 981 aa, Oryza sativa subsp. indica
MLRAAAATTAGFLPPRLAAETAPAARVVAAAGAEVRSSPLLRALGVPRGGAGIGSATPGRRMYFASGSDSSGSAADSDSEASSAAGAGEEESEGNRSSSAVAPAIIRPEDCHTVIALPLPHQPLFPGFFMAMSVKDPKLLKALVENHKRSFPYAGAFLVKNEEDTDSNTVTRSDPKKSIHGLKGKELLKHLHEIGTLAKITSIQGDQVLLLGHCRLRITEMVEEDPLTVKVDHLKHMVDFNYQRLADFGAAISVTNKLLCQGVLEELDVSKRLMLTLELVKRELEITKLQQSIAKTIEEKITGEQRRYLLNEQLKAIKKELGLETDDKTALSEKFRKRIESRKEKCPSHILQVIEEELTKLQLLEASSSEFSVTSNYLDWLTVLPWGDYSDENFDVLRAQRILDEDHYGLTDVKERILEFIAVGKLRGSSQGKIICLCGPPGVGKTSIGRSVARALNRKFYRFSVGGLSDIAEIKGHRRTYVGAMPGKMVQCLKSVGTSNPLVLIDEIDKLGRGYSGDPANALLELLDPEQNANFLDHYLDVPIDLSKVLFVCTANVIEMIPGPLLDRMEIITIAGYITDEKMHIARDYLEKNTREACGIMPEQVEVTDSALLALIENYCREAGVRNLQKQIEKVYRKIALQLVRQGVSNEPAREITLVEPSEQPTGVSIATEVENKSQRDSLAEDVSVHVIPTDFSCEKINVVSLTTKSEVDHYEHPKGVSKETSADDKATPTNTSGKMEANEHTEEVMEALVDEALVDKTVEKVVVDASNLDNFVGKAVFQPERIYDQTPVGVVMGLAWNAMGGSTLYIETAKVEDGEKKGALVVTGQLGDVMKESAQIAHTICRSILHEKEPNNTFFTKSKLHLHVPAGATPKDGPSAGCTMVTSMLSLAMGKLVKKDLAMTGEVTLTGRILPIGGVKEKTIAARRSGIKTIIFPAANRRDFDELAPNVKEGLEVHFVDKYSEIYDLAFPSDSQALAS

SEQ ID NO: 3227 - DNA, 3009 bp, Oryza sativa subsp. indica
  CDS (1)..(3009)
atgctgcgcgccgcggcggccgccgccgccgtcttcccctcgcggttcgccgccgcgccggccgtggcggcggttgaggaggtcaggtcgccgctgctcagggttttgggggcgctccgaggcggccgggtctcgacgctcgggaggagggcgcgcttctgctccaactccgccgggagcgactccgaggcggcggcggcggaagctaaggccgaggatgcggttgctgcggaaggggaggcggacggcaaggcgtcttccgccatcgtgcccaccgtcctccgccctgaggactgcctctcggtcatagcactgcctctcccacatcgtccactctttcctggattttatatgccgatctatgtaaaggaccaaaagctgttgcaagccttagtagaaaaccgcaaaagatccatcccatatgctggagcatttcttgtgaaggatgaagaaggtactgacccaaatattgtgaccagctcagattcagataaaagcattgatgatcttaaagggaaggagttgctgcagcgccttaacgaagttggtacacttgctcagataactagcattcaaggggatcaggttgtgctacttggtcaccgtcgtttaaagataaccgaaatggttcaggaggatccacttacagtaaaagttgaccatcttaaggaaaaaccgtacgataaggatgatgatgttataaaagcaacttcatttgaagttatatccaccttgagggaggttctcaaggcaagttccctttggaaggatcatgtgcaaacctacacacagcacatgggtgatttcaactacccacggttagctgattttggtgctgctatttctggtgccaataagtttctttgccaggaggtgcttgaggaattggatgtatataagcgtctaaagttaactcttgagttagtcaagaaggagatggagattagtaagttgcagcaatccattgcaaaagcaattgaagaaaaaataagtggggatcagcggcgttatttattgaatgagcaacttaaagcaatcaagaaggagctaggtttggagactgatgacaaaacagcattgtctgcaaaatttagggagcggattgaagcaaagaaggagaaatgtcctgctcatgttttgcaagtcattgaagaagaactcacaaagcttcagctgttggaagccagttctagcgagtttaatgtaacaaggaattatttggactggttgacagtattgccatggggaaactatagtgacgaaaattttgatgtacatcatgctcaacaaatccttgatgaagatcattatgggctgagtgatgtcaaagagagaatattggaatttatagcagttggcaagctaaggggaacttcacaaggaaagatcatatgtctttctgggccaccaggagttggtaaaactagtattggtcgatcaattgcacgtgcgctgaacaggaagttttacaggttttctgttggaggtttagctgatgtggcagaaatcaaggggcatcggcgtacgtatgttggtgcaatgccagggaagatggtgcaatgtcttaaatcagttggaacagcaaatcctctagtattgattgatgaaatcgacaagcttgggagagggcattctggtgatccagccagtgcattgttggaacttttggaccctgagcagaatgttaattttcttgatcactaccttgacgttcctattgatctatccaaggtcctttttgtttgcacagcaaatgttattgagatgataccaaatccattactggacaggatggagatcattgcaatagctggttatataactgatgagaagatgcatattgctcgggattatctagagaagaacacaagagaggcttgtggcattaaacctgaacaggctgaggttacagatgctgctcttcttgcccttattgaaagttactgccgagaagcaggagtgcggaatcttcaaaagcaaattgagaaaatttaccgcaagatagctctgcaacttgttcgccaaggggtatcaaatgagccaactcaagaagctgccattgtaacagcgagcgaagaacctaatggtggcgatagtgcaaacaagttgaaagatgagactatggaggatcctgctacagagaatgctgcaatgaccaatgctgatactgcctcaaaggaagctagcgaattagatttactgaagagaacagtcgatcatgatgtgcatccagctgaaacacccaaagaagctgttttaactgattcagccctatcgacagacaagttgtgcacaccagagggcaacaaggatatggagggagccaaggaagagtcagctgataaggcagttgagaaggtagtaattgattcgtcaaaccttggagattatgttgggaaacctgttttccaagctgagcgaatatatgagcagactcctgttggagttgtcatgggtttagcttggactgctatgggtggttctactttatacattgaaacaacgaaagtggaggaaggagatgggaaaggtgcacttgtgctgaccggccagcttggagatgtcatgaaggaaagtgctcagattgcgcatactgttggtagagctatattactagataaagagccagaaaatctgttctttgcaaactcaaaggtacacttgcatgttccagcagggtccacccctaaggatggccccagtgctggatgcaccatgatcacatcaatgttgtccttagctatgggaaaacctgttaagaaggaccttgcgatgacgggtgaagtaacattaactggccgaatccttccaattggcggggtcaaagagaagaccattgctgccaggagaagtgcagtaaagacaatcgtattcccagcagcgaataaaagggatttcgatgagcttgctcccaatgtgaaggagggtcttgaagttcattttgttgatacatacaatgaaatatttgatatagctttccagagtgagactcagacagaaacaagctag

SEQ ID NO: 3228 - protein, 1002 aa, Oryza sativa subsp. indica
MLRAAAAAAAVFPSRFAAAPAVAAVEEVRSPLLRVLGALRGGRVSTLGRRARFCSNSAGSDSEAAAAEAKAEDAVAAEGEADGKASSAIVPTVLRPEDCLSVIALPLPHRPLFPGFYMPIYVKDQKLLQALVENRKRSIPYAGAFLVKDEEGTDPNIVTSSDSDKSIDDLKGKELLQRLNEVGTLAQITSIQGDQVVLLGHRRLKITEMVQEDPLTVKVDHLKEKPYDKDDDVIKATSFEVISTLREVLKASSLWKDHVQTYTQHMGDFNYPRLADFGAAISGANKFLCQEVLEELDVYKRLKLTLELVKKEMEISKLQQSIAKAIEEKISGDQRRYLLNEQLKAIKKELGLETDDKTALSAKFRERIEAKKEKCPAHVLQVIEEELTKLQLLEASSSEFNVTRNYLDWLTVLPWGNYSDENFDVHHAQQILDEDHYGLSDVKERILEFIAVGKLRGTSQGKIICLSGPPGVGKTSIGRSIARALNRKFYRFSVGGLADVAEIKGHRRTYVGAMPGKMVQCLKSVGTANPLVLIDEIDKLGRGHSGDPASALLELLDPEQNVNFLDHYLDVPIDLSKVLFVCTANVIEMIPNPLLDRMEIIAIAGYITDEKMHIARDYLEKNTREACGIKPEQAEVTDAALLALIESYCREAGVRNLQKQIEKIYRKIALQLVRQGVSNEPTQEAAIVTASEEPNGGDSANKLKDETMEDPATENAAMTNADTASKEASELDLLKRTVDHDVHPAETPKEAVLTDSALSTDKLCTPEGNKDMEGAKEESADKAVEKVVIDSSNLGDYVGKPVFQAERIYEQTPVGVVMGLAWTAMGGSTLYIETTKVEEGDGKGALVLTGQLGDVMKESAQIAHTVGRAILLDKEPENLFFANSKVHLHVPAGSTPKDGPSAGCTMITSMLSLAMGKPVKKDLAMTGEVTLTGRILPIGGVKEKTIAARRSAVKTIVFPAANKRDFDELAPNVKEGLEVHFVDTYNEIFDIAFQSETQTETS

SEQ ID NO: 3229 - DNA, 3117 bp, Oryza sativa subsp. japonica
  CDS (1)..(3117)
atgctgcgcgccgcggcggccgccgccgccgtcttcccctcgcggttcgctgccgcgccggccgtggcggcggttgaggaggtcaggtcgccgctgctcagggttttgggggcgctccgaggcggccgggtctcgacgctcgggaggagggcgcgcttctgctccaactccgccgggagcgactccgaggcggcggcggcggaagctaaggccgaggatgcggttgctgcggaaggggaggcggacggcaaggcgtcttccgccatcgtgcccaccgtcctccgccctgaggactgcctctcggtcatagcactgcctctcccacatcgtccactctttcctggattttatatgccgatctatgtaaaggaccaaaagctgttgcaagccttagtagaaaaccgcaaaagatccatcccatatgctggagcatttcttgtgaaggatgaagaaggtactgacccaaatattgtgaccagctcagattcagataaaagcattgatgatcttaaagggaaggagttgctgcagcgccttaacgaagttggtacacttgctcagataactagcattcaaggggatcaggttgtgctacttggtcaccgtcgtttaaagataaccgaaatggttcaggaggatccacttacagtaaaagttgaccatcttaaggaaaaaccgtacgataaggatgatgatgttataaaagcaacttcatttgaagttatatccaccttgagggaggttctcaaggcaagttccctttggaaggatcatgtgcaaacctacacacagcacatgggtgatttcaactacccacggttagctgattttggtgctgctatttctggtgccaataagtttctttgccaggaggtgcttgaggaattggatgtatataaacgtctaaagttaactcttgagttagtcaagaaggagatggagattagtaagttgcagcaatccattgcaaaagcaattgaagaaaaaataagtggggatcagcggcgttatttattgaatgagcaacttaaagcaatcaagaaggagctaggtttggagactgatgacaaaacagcattgtctgcaaaatttagggagcggattgaagcaaagaaggagaaatgtcctgctcatgttttgcaagtcattgaagaagaactcacaaagcttcagctgttggaagccagttctagcgagtttaatgtaacaaggaattatttggactggttgacagtattgccatggggaaactatagtgacgaaaattttgatgtacatcatgctcaacaaatccttgatgaagatcattatgggctgagtgatgtcaaagagagaatattggaatttatagcagttggcaagctaaggggaacttcacaaggaaagatcatatgtctttctgggccaccaggagttggtaaaactagtattggtcgatcaattgcacgtgcgctgaacaggaagttttacaggttttctgttggaggtttagctgatgtggcagaaatcaaggggcatcggcgtacgtatgttggtgcaatgccagggaagatggtgcaatgtcttaaatcagttggaacagcaaatcctctagtattgattgatgaaatcgacaagcttgggagagggcattctggtgatccagccagtgcattgttggaacttttggaccctgagcagaatgttaattttcttgatcactaccttgacgttcctattgatctatccaaggtcctttttgtttgcacagcaaatgttattgagatgataccaaatccattactggacaggatggagatcattgcaatagctggttatataactgatgagaagatgcatattgctcgggattatctagagaagaacacaagagaggcttgtggcattaaacctgaacaggctgaggttacagatgctgctcttcttgcccttattgaaagttactgccgagaagcaggagtgcggaatcttcaaaagcaaattgagaaaatttaccgcaagatagctctgcaacttgttcgccaaggggtatcaaatgagccaactcaagaagctgccattgtaacagcgagcgaagaacctaatggtggcgatagtgcaaacaagttgaaagatgagactatggaggatcctgctacagagaatgctgcaatgaccaatgctgatactgcctcaaaggaagctagcgaattagatttactgaatagaacagtcgatcatgatgtgcatccagctgaaacacccaaagaagctgttttaactgattcagccctatcgacagacaagttgtgcacaccagagatgttgaacctgaacataatgctcacttcaaatatgcaaaatcctacaagtggtatttctgtgctgctggctgttgacctgctgattaggctgttaaagttgtcaccgggcaacaaggatatggagggagccaaggaagagtcagctgataaggcagttgagaaggtagtaattgattcgtcaaaccttggagattatgttgggaaacctgttttccaagctgagcgaatatatgagcagactcctgttggagttgtcatgggtttagcttggactgctatgggtggttctactttatacattgaaacaacgaaagtggaggaaggagatgggaaaggtgcacttgtgatgaccggccagcttggagatgtcatgaaagaaagtgctcagattgcgcatactgttggtagagctatattactagataaagagccagaaaatctgttctttgcaaactcaaaggtacacttgcatgttccagcagggtccacccctaaggatggccccagtgctggatgcaccatgatcacatcaatgttgtccttagctatgggaaaacctgttaagaaggaccttgcgatgacgggtgaagtaacattaactggccgaatccttccaattggcggggtcaaagagaagaccattgctgccaggagaagtgcagtaaagacaatcgtattcccagcagcgaataaaagggatttcgatgagcttgctcccaatgtgaaggagggtcttgaagttcattttgttgatacatacaatgaaatatttgatatagctttccagagtgagactcagacagaaacaagctag

SEQ ID NO: 3230 - protein, 1038 aa, Oryza sativa subsp. japonica
MLRAAAAAAAVFPSRFAAAPAVAAVEEVRSPLLRVLGALRGGRVSTLGRRARFCSNSAGSDSEAAAAEAKAEDAVAAEGEADGKASSAIVPTVLRPEDCLSVIALPLPHRPLFPGFYMPIYVKDQKLLQALVENRKRSIPYAGAFLVKDEEGTDPNIVTSSDSDKSIDDLKGKELLQRLNEVGTLAQITSIQGDQVVLLGHRRLKITEMVQEDPLTVKVDHLKEKPYDKDDDVIKATSFEVISTLREVLKASSLWKDHVQTYTQHMGDFNYPRLADFGAAISGANKFLCQEVLEELDVYKRLKLTLELVKKEMEISKLQQSIAKAIEEKISGDQRRYLLNEQLKAIKKELGLETDDKTALSAKFRERIEAKKEKCPAHVLQVIEEELTKLQLLEASSSEFNVTRNYLDWLTVLPWGNYSDENFDVHHAQQILDEDHYGLSDVKERILEFIAVGKLRGTSQGKIICLSGPPGVGKTSIGRSIARALNRKFYRFSVGGLADVAEIKGHRRTYVGAMPGKMVQCLKSVGTANPLVLIDEIDKLGRGHSGDPASALLELLDPEQNVNFLDHYLDVPIDLSKVLFVCTANVIEMIPNPLLDRMEIIAIAGYITDEKMHIARDYLEKNTREACGIKPEQAEVTDAALLALIESYCREAGVRNLQKQIEKIYRKIALQLVRQGVSNEPTQEAAIVTASEEPNGGDSANKLKDETMEDPATENAAMTNADTASKEASELDLLNRTVDHDVHPAETPKEAVLTDSALSTDKLCTPEMLNLNIMLTSNMQNPTSGISVLLAVDLLIRLLKLSPGNKDMEGAKEESADKAVEKVVIDSSNLGDYVGKPVFQAERIYEQTPVGVVMGLAWTAMGGSTLYIETTKVEEGDGKGALVMTGQLGDVMKESAQIAHTVGRAILLDKEPENLFFANSKVHLHVPAGSTPKDGPSAGCTMITSMLSLAMGKPVKKDLAMTGEVTLTGRILPIGGVKEKTIAARRSAVKTIVFPAANKRDFDELAPNVKEGLEVHFVDTYNEIFDIAFQSETQTETS

SEQ ID NO: 3231 - DNA, 2592 bp, Ostreococcus tauri
  CDS (1)..(2592)
atgctcgccaggcgggtcgggcgcgcgcgcgggtcgtcgaagaatgcgttcgtgcgagcgacgacggccaatgggaatgaaacactcgcgagcgcgggtgatggagggagcacgtcgtccgcgtcgtcgtcgtcgacgacgagcggaggaatcatggtgagcgcggcgcacccgagctcgcacccgcaggtgctcgcggtgcctttgcccaggaggccgctcatgccgggaataatcatgccggtcaaggtgacggatgagaagctcatcgccgagctagaagacatgcgaaaccgcggtcaggcgtacgtcggggcgtttttgatgcggagcgagggatcgtcctcgtcctcggctgcggggaaagaggaggacgcattcgacgctctgacgaagcgaaccgtcgcctccgtgggtttggacggagaggaggaggagggcgcggatccgtcagatcacatgcacgacatcgggacattcgcgcaagtgcacaatatcgtgcgccttccggcagactcaccgaacggggaggagtcggcgacgctgctgctcctcggtcacaggcgcctgagaaagctcggcacgatgaagcgagatcctttggtcgtgcaggtggagcatctcaaggatgagaagttcgatgcaaacgacgacattatcaaggccacgacgaacgaagtcgtggcgacgattaaggatcttctcaagacgaatccgctgcacaaggagaccctgcagtacttcgcgcaaaactttaatgatttccaggatccgccgaaactggccgatttgggtgcctccatgtgttcagccgacgatgcgcagctgcagcgcgtgctagagttattgtcggtaaaagatcgactggatgctacgctcgagcttttgaagaaggaggtggagattgggaagctgcaggcggacattgggaaaaaggttgaggacaaaatttcaggcgatcagcgaaggtacttcttgatggagcagttgaaatccatcaagaaggagctcgggatggagcgagacgataaaactgcacttatcgagaagttcaccaagaggttcgagcccaagcgcaagagtgtgccggaggagacggtgaaggtgattgacgaggagcttcaaaaactcagcggtctcgagccttcgtccagcgagttcaacgtcacgagaaactacctcgagtggctcacgtcacttccttggggtgtgtgcggcgatgagaaactcgacatcgcgcacgcgcaggaagtgctggacgctgatcactacggattagaagacgtcaaggaccgcatcttggaattcatcgccgtcggtcagctgctcgggacgacgcaaggaaaaatcattaccatggtcggcccgccaggagttggaaagacgtccatcgggcaatccatcgcaaaggcactcgggcgtaaattttaccgcttctcagtgggtggcatgagcgacgtcgcggagatcaagggtcaccgacgcacgtacgtcggagcgatgccgggcaaactgattcagtgcctgaaatcgacgggcgtctgcaatccggtggttttgattgacgaaatcgacaagctcggacgtggctgctcgaccccgaacaaacggcacgttcttgggattcactaccttcgacgtcccggtgaatctgaccaaagttgtaattcgtgtgcacggcgaacgtcctggacaccatccccggggcttctgctggattcgcatggagtttgtacgtctgtcaggctacatcacccgacgaaaaggccgccgaagggaaagagcggactgtctgatttcgacgcgaccatcaccgatgagccgatgtcaaagctcatcggcgactactgccgcgaagcgggcgtgagaaacttgcaaaagcatctcgaaaaggtgtaccgcaaggtggcgctcaaggtggctcgcgcaaagagtacggacacgactctcgatcccatcgtcatcgacgtcgacgatttagtggattacgtaggccaacccccgttccaaacggaccgcatttacgacgaaactccgccgggggtcgtcactggattggcttggaccgcgatgggagggagcacgttgtacatcgagtgcacctcggtggagtcgggtgagggtaagggctcgctgaaaacgacgggtcagctcggagacgtgatgaaggagtcgagcgccatcgcgcacactttcactcgaggtttccttcaatcgaaggatcccggaaacgacttccttcaaaagacatctttgcacgtgcacgtgcccgccggggcgacgccaaaagatggaccatccgctggtgtaaccatcaccacgagtctgctctcgctcgccatggacaagccagtgaaacctaacctggcgatgacgggcgagctcactctcacaggacgcgtgttgcccgtcggaggaatcaaagagaagaccatcgccgcgcgacgaagcggggtgaaaaccatcatcttcccgcaaggcaataagaaggattacgatgagctctcggaagatattcgcgagggcctggaggcttgtttcgtgtccacgtacgacgaggtgtatcgacacgcgctcgactgggatcggtga

SEQ ID NO: 3232 - protein, 863 aa, Ostreococcus tauri
MLARRVGRARGSSKNAFVRATTANGNETLASAGDGGSTSSASSSSTTSGGIMVSAAHPSSHPQVLAVPLPRRPLMPGIIMPVKVTDEKLIAELEDMRNRGQAYVGAFLMRSEGSSSSSAAGKEEDAFDALTKRTVASVGLDGEEEEGADPSDHMHDIGTFAQVHNIVRLPADSPNGEESATLLLLGHRRLRKLGTMKRDPLVVQVEHLKDEKFDANDDIIKATTNEVVATIKDLLKTNPLHKETLQYFAQNFNDFQDPPKLADLGASMCSADDAQLQRVLELLSVKDRLDATLELLKKEVEIGKLQADIGKKVEDKISGDQRRYFLMEQLKSIKKELGMERDDKTALIEKFTKRFEPKRKSVPEETVKVIDEELQKLSGLEPSSSEFNVTRNYLEWLTSLPWGVCGDEKLDIAHAQEVLDADHYGLEDVKDRILEFIAVGQLLGTTQGKIITMVGPPGVGKTSIGQSIAKALGRKFYRFSVGGMSDVAEIKGHRRTYVGAMPGKLIQCLKSTGVCNPVVLIDEIDKLGRGCSTPNKRHVLGIHYLRRPGESDQSCNSCARRTSWTPSPGLLLDSHGVCTSVRLHHPTKRPPKGKSGLSDFDATITDEPMSKLIGDYCREAGVRNLQKHLEKVYRKVALKVARAKSTDTTLDPIVIDVDDLVDYVGQPPFQTDRIYDETPPGVVTGLAWTAMGGSTLYIECTSVESGEGKGSLKTTGQLGDVMKESSAIAHTFTRGFLQSKDPGNDFLQKTSLHVHVPAGATPKDGPSAGVTITTSLLSLAMDKPVKPNLAMTGELTLTGRVLPVGGIKEKTIAARRSGVKTIIFPQGNKKDYDELSEDIREGLEACFVSTYDEVYRHALDWDR

SEQ ID NO: 3233 - DNA, 2931 bp, Oryza sativa subsp. indica
  CDS (1)..(2931)
atgctgcgcgccgcggcggccgccgccgccgtcttcccctcgcggttcgctgccgcgccggccgtggcggcggttgaggaggtcaggtcgccgctgctcagggttttgggggcgctccgaggcggccgggtctcgacgctcgggaggagggcgcgcttctgctccaactccgccgggagcgactccgaggcggcggcggcggaagctaaggccgaggatgcggttgctgcggaaggggaggcggacggcaaggcgtcttccgccatcgtgcccaccgtcctccgccctgaggactgcctctcggtcatagcactgcctctcccacatcgtccactctttcctggattttatatgccgatctatgtaaaggaccaaaagctgttgcaagccttagtagaaaaccgcaaaagatccatcccatatgctggagcatttcttgtgaaggatgaagaaggtactgacccaaatattgtgaccagctcagattcagataaaagcattgatgatcttaaagggaaggagttgctgcagcgccttaacgaagttggtacacttgctcagataactagcattcaaggggatcaggttgtgctacttggtcaccgtcgtttaaagataaccgaaatggttcaggaggatccacttacagtaaaagttgaccatcttaaggaaaaaccgtacgataaggatgatgatgttataaaagcaacttcatttgaagttatatccaccttgagggaggttctcaaggcaagttccctttggaaggatcatgtgcaaacctacacacagcacatgggtgatttcaactacccacggttagctgattttggtgctgctatttctggtgccaataagtttctttgccaggaggtgcttgaggaattggatgtatataaacgtctaaagttaactcttgagttagtcaagaaggagatggagattagtaagttgcagcaatccattgcaaaagcaattgaagaaaaaataagtggggatcagcggcgttatttattgaatgagcaacttaaagcaatcaagaaggagctaggtttggagactgatgacaaaacagcattgtctgcaaaatttagggagcggattgaagcaaagaaggagaaatgtcctgctcatgttttgcaagtcattgaagaagaactcacaaagcttcagctgttggaagccagttctagcgagtttaatgtaacaaggaattatttggactggttgacagtattgccatggggaaactatagtgacgaaaattttgatgtacatcatgctcaacaaatccttgatgaagatcattatgggctgagtgatgtcaaagagagaatattggaatttatagcagttggcaagctaaggggaacttcacaaggaaagatcatatgtctttctgggccaccaggagttggtaaaactagtattggtcgatcaattgcacgtgcgctgaacaggaagttttacaggttttctgttggaggtttagctgatgtggcagaaatcaaggggcatcggcgtacgtatgttggtgcaatgccagggaagatggtgcaatgtcttaaatcagttggaacagcaaatcctctagtattgattgatgaaatcgacaagcttgggagagggcattctggtgatccagccagtgcattgttggaacttttggaccctgagcagaatgttaattttcttgatcactaccttgacgttcctattgatctatccaaggtcctttttgtttgcacagcaaatgttattgagatgataccaaatccattactggacaggatggagatcattgcaatagctggttatataactgatgagaagatgcatattgctcgggattatctagagaagaacacaagagaggcttgtggcattaaacctgaacaggctgaggttacagatgctgctcttcttgcccttattgaaagttactgccgagaagcaggagtgcggaatcttcaaaagcaaattgagaaaatttaccgcaagatagctctgcaacttgttcgccaaggggtatcaaatgagccaactcaagaagctgccattgtaacagcgagcgaagaacctaatggtggcgatagtgcaaacaagttgaaagatgagactatggaggatcctgctacagagaatgctgcaatgaccaatgctgatactgcctcaaaggaagctagcgaattagatttactgaatagaacagtcgatcatgatggcaacaaggatatggagggagccaaggaagagtcagctgataaggcagttgagaaggtagtaattgattcgtcaaaccttggagattatgttgggaaacctgttttccaagctgagcgaatatatgagcagactcctgttggagttgtcatgggtttagcttggactgctatgggtggttctactttatacattgaaacaacgaaagtggaggaaggagatgggaaaggtgcacttgtgatgaccggccagcttggagatgtcatgaaagaaagtgctcagattgcgcatactgttggtagagctatattactagataaagagccagaaaatctgttctttgcaaactcaaaggtacacttgcatgttccagcagggtccacccctaaggatggccccagtgctggatgcaccatgatcacatcaatgttgtccttagctatgggaaaacctgttaagaaggaccttgcgatgacgggtgaagtaacattaactggccgaatccttccaattggcggggtcaaagagaagaccattgctgccaggagaagtgcagtaaagacaatcgtattcccagcagcgaataaaagggatttcgatgagcttgctcccaatgtgaaggagggtcttgaagttcattttgttgatacatacaatgaaatatttgatatagctttccagagtgagactcagacagaaacaagctag

SEQ ID NO: 3234 - protein, 976 aa, Oryza sativa subsp. indica
MLRAAAAAAAVFPSRFAAAPAVAAVEEVRSPLLRVLGALRGGRVSTLGRRARFCSNSAGSDSEAAAAEAKAEDAVAAEGEADGKASSAIVPTVLRPEDCLSVIALPLPHRPLFPGFYMPIYVKDQKLLQALVENRKRSIPYAGAFLVKDEEGTDPNIVTSSDSDKSIDDLKGKELLQRLNEVGTLAQITSIQGDQVVLLGHRRLKITEMVQEDPLTVKVDHLKEKPYDKDDDVIKATSFEVISTLREVLKASSLWKDHVQTYTQHMGDFNYPRLADFGAAISGANKFLCQEVLEELDVYKRLKLTLELVKKEMEISKLQQSIAKAIEEKISGDQRRYLLNEQLKAIKKELGLETDDKTALSAKFRERIEAKKEKCPAHVLQVIEEELTKLQLLEASSSEFNVTRNYLDWLTVLPWGNYSDENFDVHHAQQILDEDHYGLSDVKERILEFIAVGKLRGTSQGKIICLSGPPGVGKTSIGRSIARALNRKFYRFSVGGLADVAEIKGHRRTYVGAMPGKMVQCLKSVGTANPLVLIDEIDKLGRGHSGDPASALLELLDPEQNVNFLDHYLDVPIDLSKVLFVCTANVIEMIPNPLLDRMEIIAIAGYITDEKMHIARDYLEKNTREACGIKPEQAEVTDAALLALIESYCREAGVRNLQKQIEKIYRKIALQLVRQGVSNEPTQEAAIVTASEEPNGGDSANKLKDETMEDPATENAAMTNADTASKEASELDLLNRTVDHDGNKDMEGAKEESADKAVEKVVIDSSNLGDYVGKPVFQAERIYEQTPVGVVMGLAWTAMGGSTLYIETTKVEEGDGKGALVMTGQLGDVMKESAQIAHTVGRAILLDKEPENLFFANSKVHLHVPAGSTPKDGPSAGCTMITSMLSLAMGKPVKKDLAMTGEVTLTGRILPIGGVKEKTIAARRSAVKTIVFPAANKRDFDELAPNVKEGLEVHFVDTYNEIFDIAFQSETQTETS

SEQ ID NO: 3235 - DNA, 3009 bp, Oryza sativa subsp. japonica
  CDS (1)..(3009)
atgctgcgcgccgcggcggccgccgccgccgtcttcccctcgcggttcgctgccgcgccggccgtggcggcggttgaggaggtcaggtcgccgctgctcagggttttgggggcgctccgaggcggccgggtctcgacgctcgggaggagggcgcgcttctgctccaactccgccgggagcgactccgaggcggcggcggcggaagctaaggccgaggatgcggttgctgcggaaggggaggcggacggcaaggcgtcttccgccatcgtgcccaccgtcctccgccctgaggactgcctctcggtcatagcactgcctctcccacatcgtccactctttcctggattttatatgccgatctatgtaaaggaccaaaagctgttgcaagccttagtagaaaaccgcaaaagatccatcccatatgctggagcatttcttgtgaaggatgaagaaggtactgacccaaatattgtgaccagctcagattcagataaaagcattgatgatcttaaagggaaggagttgctgcagcgccttaacgaagttggtacacttgctcagataactagcattcaaggggatcaggttgtgctacttggtcaccgtcgtttaaagataaccgaaatggttcaggaggatccacttacagtaaaagttgaccatcttaaggaaaaaccgtacgataaggatgatgatgttataaaagcaacttcatttgaagttatatccaccttgagggaggttctcaaggcaagttccctttggaaggatcatgtgcaaacctacacacagcacatgggtgatttcaactacccacggttagctgattttggtgctgctatttctggtgccaataagtttctttgccaggaggtgcttgaggaattggatgtatataaacgtctaaagttaactcttgagttagtcaagaaggagatggagattagtaagttgcagcaatccattgcaaaagcaattgaagaaaaaataagtggggatcagcggcgttatttattgaatgagcaacttaaagcaatcaagaaggagctaggtttggagactgatgacaaaacagcattgtctgcaaaatttagggagcggattgaagcaaagaaggagaaatgtcctgctcatgttttgcaagtcattgaagaagaactcacaaagcttcagctgttggaagccagttctagcgagtttaatgtaacaaggaattatttggactggttgacagtattgccatggggaaactatagtgacgaaaattttgatgtacatcatgctcaacaaatccttgatgaagatcattatgggctgagtgatgtcaaagagagaatattggaatttatagcagttggcaagctaaggggaacttcacaaggaaagatcatatgtctttctgggccaccaggagttggtaaaactagtattggtcgatcaattgcacgtgcgctgaacaggaagttttacaggttttctgttggaggtttagctgatgtggcagaaatcaaggggcatcggcgtacgtatgttggtgcaatgccagggaagatggtgcaatgtcttaaatcagttggaacagcaaatcctctagtattgattgatgaaatcgacaagcttgggagagggcattctggtgatccagccagtgcattgttggaacttttggaccctgagcagaatgttaattttcttgatcactaccttgacgttcctattgatctatccaaggtcctttttgtttgcacagcaaatgttattgagatgataccaaatccattactggacaggatggagatcattgcaatagctggttatataactgatgagaagatgcatattgctcgggattatctagagaagaacacaagagaggcttgtggcattaaacctgaacaggctgaggttacagatgctgctcttcttgcccttattgaaagttactgccgagaagcaggagtgcggaatcttcaaaagcaaattgagaaaatttaccgcaagatagctctgcaacttgttcgccaaggggtatcaaatgagccaactcaagaagctgccattgtaacagcgagcgaagaacctaatggtggcgatagtgcaaacaagttgaaagatgagactatggaggatcctgctacagagaatgctgcaatgaccaatgctgatactgcctcaaaggaagctagcgaattagatttactgaatagaacagtcgatcatgatgtgcatccagctgaaacacccaaagaagctgttttaactgattcagccctatcgacagacaagttgtgcacaccagagggcaacaaggatatggagggagccaaggaagagtcagctgataaggcagttgagaaggtagtaattgattcgtcaaaccttggagattatgttgggaaacctgttttccaagctgagcgaatatatgagcagactcctgttggagttgtcatgggtttagcttggactgctatgggtggttctactttatacattgaaacaacgaaagtggaggaaggagatgggaaaggtgcacttgtgatgaccggccagcttggagatgtcatgaaagaaagtgctcagattgcgcatactgttggtagagctatattactagataaagagccagaaaatctgttctttgcaaactcaaaggtacacttgcatgttccagcagggtccacccctaaggatggccccagtgctggatgcaccatgatcacatcaatgttgtccttagctatgggaaaacctgttaagaaggaccttgcgatgacgggtgaagtaacattaactggccgaatccttccaattggcggggtcaaagagaagaccattgctgccaggagaagtgcagtaaagacaatcgtattcccagcagcgaataaaagggatttcgatgagcttgctcccaatgtgaaggagggtcttgaagttcattttgttgatacatacaatgaaatatttgatatagctttccagagtgagactcagacagaaacaagctag

SEQ ID NO: 3236 - protein, 1002 aa, Oryza sativa subsp. japonica
MLRAAAAAAAVFPSRFAAAPAVAAVEEVRSPLLRVLGALRGGRVSTLGRRARFCSNSAGSDSEAAAAEAKAEDAVAAEGEADGKASSAIVPTVLRPEDCLSVIALPLPHRPLFPGFYMPIYVKDQKLLQALVENRKRSIPYAGAFLVKDEEGTDPNIVTSSDSDKSIDDLKGKELLQRLNEVGTLAQITSIQGDQVVLLGHRRLKITEMVQEDPLTVKVDHLKEKPYDKDDDVIKATSFEVISTLREVLKASSLWKDHVQTYTQHMGDFNYPRLADFGAAISGANKFLCQEVLEELDVYKRLKLTLELVKKEMEISKLQQSIAKAIEEKISGDQRRYLLNEQLKAIKKELGLETDDKTALSAKFRERIEAKKEKCPAHVLQVIEEELTKLQLLEASSSEFNVTRNYLDWLTVLPWGNYSDENFDVHHAQQILDEDHYGLSDVKERILEFIAVGKLRGTSQGKIICLSGPPGVGKTSIGRSIARALNRKFYRFSVGGLADVAEIKGHRRTYVGAMPGKMVQCLKSVGTANPLVLIDEIDKLGRGHSGDPASALLELLDPEQNVNFLDHYLDVPIDLSKVLFVCTANVIEMIPNPLLDRMEIIAIAGYITDEKMHIARDYLEKNTREACGIKPEQAEVTDAALLALIESYCREAGVRNLQKQIEKIYRKIALQLVRQGVSNEPTQEAAIVTASEEPNGGDSANKLKDETMEDPATENAAMTNADTASKEASELDLLNRTVDHDVHPAETPKEAVLTDSALSTDKLCTPEGNKDMEGAKEESADKAVEKVVIDSSNLGDYVGKPVFQAERIYEQTPVGVVMGLAWTAMGGSTLYIETTKVEEGDGKGALVMTGQLGDVMKESAQIAHTVGRAILLDKEPENLFFANSKVHLHVPAGSTPKDGPSAGCTMITSMLSLAMGKPVKKDLAMTGEVTLTGRILPIGGVKEKTIAARRSAVKTIVFPAANKRDFDELAPNVKEGLEVHFVDTYNEIFDIAFQSETQTETS

SEQ ID NO: 3237 - DNA, 2847 bp, Oryza sativa subsp. indica
  CDS (1)..(2847)
atgctgcgcgccgcggccgccaccaccgccgggttcctcccgccgcgtctggccgccgagacggcgcccgcggcaagggttgtggcggcggcgggtgccgaggtgaggtcgtcgccgctcctcagggctctaggggtgccgagaggcggcgccggcattgggagcgccacgccggggaggaggatgtacttcgcctccggctccgactcctccggaagcgccgccgacagcgactcggaggcgtcgtccgccgctggcgctggggaggaggagagcgagggcaacaggtcgtcctccgctgtcgctcccgccattatccgacccgaggactgccacacggtcatagctttgcctttgccacatcagccactatttccaggattttttatggcaatgtctgtaaaggatccgaagttgttgaaagctttagttgaaaaccacaaaagatctttcccatatgctggggcctttcttgtcaagaatgaggaagatactgacagtaacactgtcacacgttcagatccaaagaaaagcattcatggtctgaaagggaaagaattattgaagcatcttcatgaaattggcactcttgctaagataacaagcattcaaggagatcaggtgttgctacttggtcactgccgtttacggataactgaaatggttgaggaggacccacttacagttaaagttgaccatctaaaggtgtcgaagcgtttgatgttgacccttgaattagtaaagagggaattggagattactaagttgcagcaatccatagcaaaaacaattgaagaaaaaataactggagagcagcgccgctacttattgaatgagcaacttaaagcaatcaagaaggagctaggcttggagactgatgataaaacagcgttgtcagaaaaatttaggaaaaggattgaatcgagaaaagagaaatgcccatctcatatcttacaagtcattgaagaagagctcactaaacttcaattactggaagctagttctagtgagttcagtgttaccagcaattatttagactggctaacagtattgccatggggggattacagtgatgaaaactttgatgttcttcgtgctcaacgcattcttgatgaagatcactatggtctaactgatgtaaaagaaagaatattggagtttatagcagttggaaaattaagaggaagctcacaaggtaaaattatatgtctctgtggaccacctggcgttggtaaaactagtattggacgatcagttgcacgtgcattaaaccggaagttctacagattttctgttgggggtttgtctgatatagcagaaatcaagggtcatcgacggacctatgttggggcaatgccagggaagatggttcagtgtctgaaatcagtcggaacttcaaatcctctggttttgatagatgataccgacaagctagggagagggtattctggtgatccagccaatgcactgttggaacttcttgatcctgaacagaatgctaactttcttgatcattatcttgatgttcctattgacctctccaaggttctgtttgtttgcactgcagatgtcatagagatgataccaggccctctactggacaggatggagatcattactattgccggttatataaccgatgagaagatgcatattgcacgggattacctagaaaagaacacaagggaggcttgtggcatcatgcctgagcaggttgaggttacggatagtgctcttcttgctcttattgaaaactattgccgggaagccggtgtgcgtaaccttcaaaaacagattgaaaaagtttaccggaagatagctctgcaacttgttcgtcaaggggtatcaaatgagccagctcgggagatcacattggtggaaccaagtgaacaacctactggtgttagcattgcaacagaagtggaaaacaagagccagagggacagtcttgcagaagatgtttcagtgcatgttattccaactgatttttcttgtgagaagattaatgtagtatccttaacaaccaagtcagaagtagaccactacgagcatccaaaaggagtatctaaagaaacttctgcagatgacaaagctacaccaacgaatacatcaggcaaaatggaggccaatgaacacacagaggaagtaatggaagcacttgtagatgaagcacttgtagacaagactgtggagaaagtagttgttgatgcatcaaatctggataactttgttgggaaggctgtattccaaccagagcgtatatacgatcaaactcctgttggggtagtcatgggtttagcttggaatgctatgggtggttctaccttgtatattgagacagcaaaagttgaggacggcgaaaaaaaaggtgcacttgtggtgacaggccagcttggagatgtcatgaaagagagtgctcaaattgcacatacaatttgcagatctatattacatgagaaagaaccaaataacaccttttttacaaagtcaaagcttcacttacatgttcctgcaggggctactccaaaggatggccccagtgctggatgcacgatggttacatcgatgctgtctttagccatgggaaagctggtaaagaaagacctcgcaatgactggggaagtaacattgactggacgaattctcccaattggtggggtgaaggagaaaaccatcgctgccaggagaagtgggataaagacgatcatattcccagcagcgaacagaagagatttcgacgagcttgctcctaatgtaaaagaaggtcttgaagtccactttgttgacaaatacagtgaaatatatgatttagcttttccaagtgatagtcaggcattagcaagctag

SEQ ID NO: 3238 - protein, 948 aa, Oryza sativa subsp. indica
MLRAAAATTAGFLPPRLAAETAPAARVVAAAGAEVRSSPLLRALGVPRGGAGIGSATPGRRMYFASGSDSSGSAADSDSEASSAAGAGEEESEGNRSSSAVAPAIIRPEDCHTVIALPLPHQPLFPGFFMAMSVKDPKLLKALVENHKRSFPYAGAFLVKNEEDTDSNTVTRSDPKKSIHGLKGKELLKHLHEIGTLAKITSIQGDQVLLLGHCRLRITEMVEEDPLTVKVDHLKVSKRLMLTLELVKRELEITKLQQSIAKTIEEKITGEQRRYLLNEQLKAIKKELGLETDDKTALSEKFRKRIESRKEKCPSHILQVIEEELTKLQLLEASSSEFSVTSNYLDWLTVLPWGDYSDENFDVLRAQRILDEDHYGLTDVKERILEFIAVGKLRGSSQGKIICLCGPPGVGKTSIGRSVARALNRKFYRFSVGGLSDIAEIKGHRRTYVGAMPGKMVQCLKSVGTSNPLVLIDDTDKLGRGYSGDPANALLELLDPEQNANFLDHYLDVPIDLSKVLFVCTADVIEMIPGPLLDRMEIITIAGYITDEKMHIARDYLEKNTREACGIMPEQVEVTDSALLALIENYCREAGVRNLQKQIEKVYRKIALQLVRQGVSNEPAREITLVEPSEQPTGVSIATEVENKSQRDSLAEDVSVHVIPTDFSCEKINVVSLTTKSEVDHYEHPKGVSKETSADDKATPTNTSGKMEANEHTEEVMEALVDEALVDKTVEKVVVDASNLDNFVGKAVFQPERIYDQTPVGVVMGLAWNAMGGSTLYIETAKVEDGEKKGALVVTGQLGDVMKESAQIAHTICRSILHEKEPNNTFFTKSKLHLHVPAGATPKDGPSAGCTMVTSMLSLAMGKLVKKDLAMTGEVTLTGRILPIGGVKEKTIAARRSGIKTIIFPAANRRDFDELAPNVKEGLEVHFVDKYSEIYDLAFPSDSQALAS

SEQ ID NO: 3239 - DNA, 3192 bp, Paracoccidioides brasiliensis
  CDS (1)..(3192)
atgattcgggcacagagcctgccctggagggaagctctccgccaggcttcgcgggcactcccgtgtagatactcagcttcgtctttcagatttaacgcaatctcgagcctagaggcgaggactttgcatcattcccccttcgcttcggcatcccgaactttctcatccagtcatgcacaacgaaaagaaaagcaaccacctgagccgaaagatgaaaaggaggagggaacggaggtagaaaaggatcaggagcaaaagccaagacctgggaaacccactgaagggaaagataagtcttcagatacgccgtcgccaatacccgtttctgcttcgccggcagacccaaaacctagcagcgcaagcgcttccggaggcgctgcctctgggagcggcgatggcgggaaaaggggccggaaaacctctgcggaaaaggccctgcagaaagctacgattccagatatctatccacaggtcatggctattccaattgcacgcaggccattgttccccggatattccaaggcagttactgtccgggatcccaatgttatagcagccatacaggaaatgatgaagcggggacaaccatatgttggcgcatttttgtttaaggatgaagcggcggatagagatgtgatagaggatatagatgaggtgcatgatgttggtgtatttgcgcagatcacaagtgtcttccccgtacccggagccgagagcggtttgaccgcagtcctgtatcctcacaggagaatcaagatttcgtcactgacaccatccagggatgcatcgcagaatgctgagggtgaccagcaggctacgaaggaagcaactgctgaaaagcagggtgacgttgtcgccagctttgaagaggccacgctagaccagccaccgaaggagcctccatacgaacctacctcgttcttacacaaatatcctgtcagtatagtcaatgtggagaatcttacagaggagccttatgacaagaagaataccatgattcgcgctgttacgaacgagatcgtgaatgtcttcaaggatattgcaaatctgaatcctcttttccgtgatcagatctcgaccttttccatgagtcactccggcaatattatggatgaaccggcaaacctagctgatttcgctgctgccgtgtctgctggcgaagtcaatgagttacaagatgtcttggacacgatgaacatccaggaacgcctgtctaaggcactcgtggttttaaaaaaagaactcatgaatgcgcaactacaatcgaagatatcaaaggatgtcgaagcgaaaatacaaaagcggcagcgagaatattggctgatggaacagatgaagggtattcgtcgtgaactgggaatcgaatccgacgggaaagaaaagcttgtggagaagtttaaggagaagacggagaaacttgctatgcctgacggtgtgaagaaagtgtttgatgaagagctgaacaaactgtcacaccttgaacctgcagcttcagagttcaacgtcacgaggaactaccttgactggataacacaggttccatggggtaagaggagtgctgagacttttggcattaagaacgcaatggccgtgttggatgaagaccactatggtttgaaggacgtcaaggatcgtatcttggaatttattgctgttgggaaacttcgggggaccgtcgagggaaagattctctgttttgtggggcctcctggcgttggtaaaactagcattggaaaatcgattgcgcgagcacttaatcgggagtactatcgattcagcgtcggtggacttacagacgtggcggagattaagggtcatcgacgaacctacattggtgctttaccaggtcgcgtcatccaagccctgaaaaagtgtcagaccgagaaccccttgatacttatcgatgaagttgataaaatcggtcgagggcatcagggcgatccctcgtcggctcttctggaacttttggacccagagcaaaactcctctttcttggatcactacatggacatctccgttgatctttcaaaggttttatttgtctgcactgctaatatgacagatacaattccccgtcccttgctggatagaatggaaataatcgagttgtctgggtacgttgcagacgagaagatggctatcgcggaacgatatttggcacccacagcgaaggagatgagtggtctgaaagacgttgatgtgaagctggagaagggcgctattgaggaattaatcaagtcgtactgtcgtgaaagtggtgtgcgaaatctcaagaagcagatagaaaaggtttacagaaaagctgcgttgaatattatacagtctttaccggagcaagagatggaagctgaagaaacagctgtccgagaggaggtgaaaactgaccctgaacaggagaagaaaaccgaagaaagtgaagagggaggcgagatatcacctcaagttcaaccaccgatagtcgcggtccatgtcccaaaagatgtacacgtttcaattgatagagaggatctcaaagattatgttggtcctcccattttcacctctgacaggctctatgatgttacccctccaggtgtagccatgggtctggcgtggaccagcatgggaggcgctgctttatatgtcgagtcgattctggaagctaccctatcacctacatccactccaagtatcgagcagaccggaaaccttatgacggttatgaaggagtcgactgtgatagcgtattcgttttcgaaatcgttgatggccaaggagtttccggagaatagattcttcgagcgggcgaaggtccacttgcattgtccagaaggcgctgttcagaaagacggaccctctgctggcatcacgatggcagcctccctactctcacttgccctcaaccatcccatcgaccctacaattgccatgactggcgaacttactgtgacggcaaagttctccgtatcggtggcctgcgcgagaaaaccgtcgcaagctcgacgagcgggtgccaagtcaataatcttcccagccgataacatgtccgattggctggaactacctgagaacatcaaaaagggcatcgaaggccatgctgtaaactggtattcggaagtttacgacatcatcttccgcgaccttgacaagatccaagctcaaaatatgtggaagacccaacttgaacaggttcccaatcgtcataaaatctga

SEQ ID NO: 3240 - protein, 1063 aa, Paracoccidioides brasiliensis
MIRAQSLPWREALRQASRALPCRYSASSFRFNAISSLEARTLHHSPFASASRTFSSSHAQRKEKQPPEPKDEKEEGTEVEKDQEQKPRPGKPTEGKDKSSDTPSPIPVSASPADPKPSSASASGGAASGSGDGGKRGRKTSAEKALQKATIPDIYPQVMAIPIARRPLFPGYSKAVTVRDPNVIAAIQEMMKRGQPYVGAFLFKDEAADRDVIEDIDEVHDVGVFAQITSVFPVPGAESGLTAVLYPHRRIKISSLTPSRDASQNAEGDQQATKEATAEKQGDVVASFEEATLDQPPKEPPYEPTSFLHKYPVSIVNVENLTEEPYDKKNTMIRAVTNEIVNVFKDIANLNPLFRDQISTFSMSHSGNIMDEPANLADFAAAVSAGEVNELQDVLDTMNIQERLSKALVVLKKELMNAQLQSKISKDVEAKIQKRQREYWLMEQMKGIRRELGIESDGKEKLVEKFKEKTEKLAMPDGVKKVFDEELNKLSHLEPAASEFNVTRNYLDWITQVPWGKRSAETFGIKNAMAVLDEDHYGLKDVKDRILEFIAVGKLRGTVEGKILCFVGPPGVGKTSIGKSIARALNREYYRFSVGGLTDVAEIKGHRRTYIGALPGRVIQALKKCQTENPLILIDEVDKIGRGHQGDPSSALLELLDPEQNSSFLDHYMDISVDLSKVLFVCTANMTDTIPRPLLDRMEIIELSGYVADEKMAIAERYLAPTAKEMSGLKDVDVKLEKGAIEELIKSYCRESGVRNLKKQIEKVYRKAALNIIQSLPEQEMEAEETAVREEVKTDPEQEKKTEESEEGGEISPQVQPPIVAVHVPKDVHVSIDREDLKDYVGPPIFTSDRLYDVTPPGVAMGLAWTSMGGAALYVESILEATLSPTSTPSIEQTGNLMTVMKESTVIAYSFSKSLMAKEFPENRFFERAKVHLHCPEGAVQKDGPSAGITMAASLLSLALNHPIDPTIAMTGELTVTAKFSVSVACARKPSQARRAGAKSIIFPADNMSDWLELPENIKKGIEGHAVNWYSEVYDIIFRDLDKIQAQNMWKTQLEQVPNRHKI

SEQ ID NO: 3241 - DNA, 2823 bp, Arabidopsis thaliana
  CDS (1)..(2823)
atgttaaagctcttcacttcctccgcctctcgagtccaccatttgactccggtaagtagggtcgtcgggtcttctccagtggagtctccattgttcaaagcgttgagtcaaatcactgggtggaatcggcgatctacttcgttgggtcatcgtgctttcttctgctctgagcctaccaatggagaggcggcggctgaagctgaaactaaggcggtggagtccgattctgaagtgtctgactccaaatcttcgtctgcgattgtgcccactaaccctaggcctgaagattgtttaacggttctagcattgccggtgccacataggccgctttttcctggtttttacatgccaatctatgtcaaggatcctaaagtactcgcagccttacaagagagcagaagacgacaagctccatatgcaggagctttccttctgaaggatgacccatcagctgattcatcttcaagcactgacgcagaaaaaaacataaatgagctgaaagggaaagagttgcttaaccggcttcacgaagttggcacacttgctcagatttcaagtatccaaggagaccaagttatccttgttggtcacaggcgacttcgcataaaagagatggtgagcgaagaaccacttaccgtcaaagtcgatcatcttaaggataatccgtttgacatggacgatgatgtcgtcaaggcaacatcttttgaagttatttcaactcttagggatgtactgaagacaagttcactatggagagatcacgttcagacatatacccagcatataggtgatttcacttatccacgactagctgattttggagcggcgatatgtggcgcaaataggcatcaagctcaagaagttcttgaagaactggatgttcacaaacgtctgcggttgacgctggaattgatgaaaaaagaaatggaaattagcaagatacaggaaaccatagcaaaagcaattgaagaaaaaattagcggtgagcaacgtcgttacttgctaaatgagcagctcaaggctataaagaaggagcttggtgtggagacagatgacaaatctgcactttctgcaaagtttaaggaaaggattgagcctaacaaggaaaaaattccagcgcatgtattacaagtcatagaagaagagcttacaaagctgcagctgttagaggcgagttcaagcgagtttaacgtgacgcgtaactaccttgattggttgaccatattgccttggggaaattacagtaatgaaaactttgatgttgcacgggcgcaaacaattcttgacgaggatcactatggcttatctgacgtaaaggaaagaatactggaatttattgcagtgggaagacttagaggcacttcacaagggaaaatcatctgcctctccggccctcctggagtaggcaaaactagtattgggcggtctattgcacgtgctcttaatcgcaaatttttccggttctctgttggagggttagcagatgtcgctgagatcaaggggcatcgtcggacatatgttggcgccatgccaggaaagatggtgcaatgtctaaagagtgtggggacagcaaatcctcttgttctaatcgatgagattgataagctggggagaggccatgctggtgacccggccagtgctttgttggagcttctggatccagagcaaaacgcaaattttctggaccactatctcgacgttactatagatctatcaaaggttttatttgtgtgcacagcaaatgtgatagacatgattccaaatcctttgctagacagaatggaggtgatttctattgctgggtatatcactgatgaaaaagttcatatcgcaagagactatttggaaaaaactgcacgtggagattgtggtgtcaagcctgaacaggttgaggtgagtgatgcagcgcttctttccttgatagaaaattactgcagagaagcaggtgttaggaatctccagaaacagatcgagaagatttaccgtaagattgcacttaaattagtgcgtgaaggagcagtccccgaagagcctgcagttgcaagtgatcctgaagaagctgaaatcgtggctgatgttggcgaatccatagagaatcatactgtcgaagaaaacactgtgtcctctgctgaagaaccaaaggaagaggcccaaaccgagaagatagctattgaaacggttatgattgatgagtcaaaccttgcggattatgtaggaaaaccggtattccatgcagagaagctctatgagcagacaccggtaggtgttgtgatgggtctagcttggacatcaatgggtggttcaacattgtacatagagacgactgttgtggaggaaggggaaggtaaaggtggcctgaatataacgggtcagctcggtgatgtgatgaaagaaagtgcacaaattgctcacacagtcgccagaaagatcatgctagagaaagaaccagagaatcagttctttgcaaactccaagcttcatctccatgttcctgcaggagccactcccaaggatggtccaagtgcaggctgcaccatgatcacatctttactatcacttgccacgaagaaacccgttaggaaggaccttgcaatgactggagaagtcacactaaccggaagaattcttcctattggtggggtgaaagagaaaactatagcggcgaggcggagtcagattaaaacaataatatttccagaggcaaaccggagagactttgatgagctggcagagaatgtgaaagaagggcttaatgttcacttcgtggatgactatggaaagatcttcgagcttgcctttggctatgacaaacaagaagactga

SEQ ID NO: 3242 - protein, 940 aa, Arabidopsis thaliana
MLKLFTSSASRVHHLTPVSRVVGSSPVESPLFKALSQITGWNRRSTSLGHRAFFCSEPTNGEAAAEAETKAVESDSEVSDSKSSSAIVPTNPRPEDCLTVLALPVPHRPLFPGFYMPIYVKDPKVLAALQESRRRQAPYAGAFLLKDDPSADSSSSTDAEKNINELKGKELLNRLHEVGTLAQISSIQGDQVILVGHRRLRIKEMVSEEPLTVKVDHLKDNPFDMDDDVVKATSFEVISTLRDVLKTSSLWRDHVQTYTQHIGDFTYPRLADFGAAICGANRHQAQEVLEELDVHKRLRLTLELMKKEMEISKIQETIAKAIEEKISGEQRRYLLNEQLKAIKKELGVETDDKSALSAKFKERIEPNKEKIPAHVLQVIEEELTKLQLLEASSSEFNVTRNYLDWLTILPWGNYSNENFDVARAQTILDEDHYGLSDVKERILEFIAVGRLRGTSQGKIICLSGPPGVGKTSIGRSIARALNRKFFRFSVGGLADVAEIKGHRRTYVGAMPGKMVQCLKSVGTANPLVLIDEIDKLGRGHAGDPASALLELLDPEQNANFLDHYLDVTIDLSKVLFVCTANVIDMIPNPLLDRMEVISIAGYITDEKVHIARDYLEKTARGDCGVKPEQVEVSDAALLSLIENYCREAGVRNLQKQIEKIYRKIALKLVREGAVPEEPAVASDPEEAEIVADVGESIENHTVEENTVSSAEEPKEEAQTEKIAIETVMIDESNLADYVGKPVFHAEKLYEQTPVGVVMGLAWTSMGGSTLYIETTVVEEGEGKGGLNITGQLGDVMKESAQIAHTVARKIMLEKEPENQFFANSKLHLHVPAGATPKDGPSAGCTMITSLLSLATKKPVRKDLAMTGEVTLTGRILPIGGVKEKTIAARRSQIKTIIFPEANRRDFDELAENVKEGLNVHFVDDYGKIFELAFGYDKQED

SEQ ID NO: 3243 - DNA, 2895 bp, Zea mays
  CDS (1)..(2895)
atgctgcgtgcggctgtggcggcggcggaggagctcaggtctccgctgctcagggtcattgggacgctgagggacggccgcggctcggtgctgctgggtaggagggtgcgtttctgctccaactcttccgcgagcgacaccgaggcggcggtggcagaggcggaggcgaaggccgaggatgcgtccgctgcggagggtgaggcggacagcaaggcgtcttccgccatcgtgccgaccagcaccaatatcgatgattgcctctcggttatagcgttacctcttccacatcggccactctttcctggattctacatgccgatcaatgtgaaggaccaaaagctgctgcaagccctaatagaaaatcgcaaaagatcagctccgtatgctggtgcctttcttgtgaaagatgaagaaggtactgaccctaacatcgtgactggttcagattcagcgaaaagcattgatgatctcaaagggaaagacttgctgaagcgtcttcatgaagttgggacgcttgctcagattacaagcattcaaggggatcatgtagttctacttggtcaccgacgtttacggataactgagatggtcgaagaggatccacttacagttaaagttgaccatctaaaggaaaagccctacaacaaggacgatgatgttatgaaagctacatcattcgaagttatatcaactttaagggaagttctaaggacaagttccctttggaaggatcatgtgcaaacctacacacagcacattggtgactttaactaccaacggttagcagactttggtgctgctatctctggtgccaacaagttgctttgccaggaagttcttgaggaattggatgtatacaagcgtttgaagttgacccttgagttagtaaaaaaggagatggagattagtaagctacagcaatccatagcaaaagcaattgaagaaaagattagtggagatcagcgacgttatttattgaacgagcaacttaaggcaatcaagaaggagttgggtttggagactgatgacaaaacagcattgtctgcaaaatttagagaacgtatagaatcaaagaaggacaaatgtcctcctcatgttttacaagtcattgaagaagagcttaccaagcttcagcttttagaagccagctctagtgagttcagtgtaactcgtaattatttggactggctgacagtgttgccatggggaaattatagtgatgaaaacttcgatgtccaccatgctcagaaaattctcgatgaagaccattatggtttgagtgatgtgaaagagaggatactggaattcatagcagttgggaagttaagagggacttcacaaggcaagatcatatgtctttctgggccaccgggagttggaaaaaccagtattggtcgttcaattgcacgtgcactgaaccgtcagttctacaggttttctgttggaggtttggctgatgtggctgaaatcaagggccatcgacgcacatatgttggtgcaatgccagggaagatggtgcagtgtcttaaatcagttggtacagcaaatcctctagtgttgatagatgagattgacaagcttgggaagggtcattctggcgatccagctagtgcattgttggaactccttgaccctgagcagaatgttaatttcttagatcactaccttgatgttcctattgacctatccaaggttctatttgtttgcacagcaaacgtaatagagatgataccaaatccattactggataggatggagatcattgctatagctgggtatataactgatgagaagatgcatattgctcgggactatctagagaagaatacaagacaggcttgtggcattaagcctgagcaggttgaagttacagatactgctcttcttgctctcattgaaaactactgtcgagaagctggagtgaggaaccttcaaaagcagattgagaaaatttaccgtaagatagctctgcagcttgttcgccaaggagtatcgaatgagccagaccatgagtctgtcagtgcctctgtaactgaggaatctggtaatggtgataacaccacaacaaaagatgagattttgaaggatcctgctgtagaagatgcttcagtcaccaacaatgttacaaatcctgcctccgaggaagctaatgaagaaaatttgacaagtgaagcagcaaaagaagacagcacatctaagggcaacaagggcactgatggagcagcggacaaggcaattgagaaggttgtggtcgattcatcaaaccttggtgattttgttgggaaacctgtgttccaggctgagcgtatatatgagcatactccagttggagtggtcatgggtttagcttggactgctatgggtggttctactttgtacatcgaaacaaaaaaagtggaggaaagggaagggaaaggtgcacttgtgcttacaggacagcttggagatgtcatgaaagagagtgctcagattgcgcacacagttggcagagctgtattactggagaaagagccagataaccatttttttgcaaactcgaaggtgcacttgcatgttcctgcagggtccacccctaaggatggccctagtgctggatgcaccatgataacatctatgctgtccttagctatgggaaagcctgtcaagaaggacctcgcaatgacgggtgaagtaacactaaccggaagaatcctcccaatcggcggggtaaaagagaaaacaattgcggcaaggagaagtgcgataaagacactcatatttccggcagcgaataaaagggatttcgatgagcttgcttctaatgtgaaggaaggcctcgaagttcattttgttgacacatacagtgaaatatatgatttagctttccagagtgacgccgggacagaaacaagctga

SEQ ID NO: 3244 - protein, 964 aa, Zea mays
MLRAAVAAAEELRSPLLRVIGTLRDGRGSVLLGRRVRFCSNSSASDTEAAVAEAEAKAEDASAAEGEADSKASSAIVPTSTNIDDCLSVIALPLPHRPLFPGFYMPINVKDQKLLQALIENRKRSAPYAGAFLVKDEEGTDPNIVTGSDSAKSIDDLKGKDLLKRLHEVGTLAQITSIQGDHVVLLGHRRLRITEMVEEDPLTVKVDHLKEKPYNKDDDVMKATSFEVISTLREVLRTSSLWKDHVQTYTQHIGDFNYQRLADFGAAISGANKLLCQEVLEELDVYKRLKLTLELVKKEMEISKLQQSIAKAIEEKISGDQRRYLLNEQLKAIKKELGLETDDKTALSAKFRERIESKKDKCPPHVLQVIEEELTKLQLLEASSSEFSVTRNYLDWLTVLPWGNYSDENFDVHHAQKILDEDHYGLSDVKERILEFIAVGKLRGTSQGKIICLSGPPGVGKTSIGRSIARALNRQFYRFSVGGLADVAEIKGHRRTYVGAMPGKMVQCLKSVGTANPLVLIDEIDKLGKGHSGDPASALLELLDPEQNVNFLDHYLDVPIDLSKVLFVCTANVIEMIPNPLLDRMEIIAIAGYITDEKMHIARDYLEKNTRQACGIKPEQVEVTDTALLALIENYCREAGVRNLQKQIEKIYRKIALQLVRQGVSNEPDHESVSASVTEESGNGDNTTTKDEILKDPAVEDASVTNNVTNPASEEANEENLTSEAAKEDSTSKGNKGTDGAADKAIEKVVVDSSNLGDFVGKPVFQAERIYEHTPVGVVMGLAWTAMGGSTLYIETKKVEEREGKGALVLTGQLGDVMKESAQIAHTVGRAVLLEKEPDNHFFANSKVHLHVPAGSTPKDGPSAGCTMITSMLSLAMGKPVKKDLAMTGEVTLTGRILPIGGVKEKTIAARRSAIKTLIFPAANKRDFDELASNVKEGLEVHFVDTYSEIYDLAFQSDAGTETS

SEQ ID NO: 3245 - DNA, 2775 bp, Arabidopsis thaliana
  CDS (1)..(2775)
atgatgcctaaacggtttaacacgagtggctttgacacgactcttcgtctaccttcgtactacggtttcttgcatcttacacaaagcttaaccctaaattcccgcgttttctacggtgcccgccatgtgactcctccggctattcggatcggatccaatccggttcagagtctactactcttcagggcaccgactcagcttaccggatggaaccggagttctcgcgatttattgggtcgtcgtgtttctttctccgatcgcagtgacggtgtcgatctcttatcttcttcaccgattctctcaactaaccctaacctcgacgattctctaacggttatagcattgccgttgcctcacaaacctcttattcctggcttttacatgccaatccatgtcaaggatcctaaagttcttgcagctttacaagagagcacaagacaacaatctccatatgtgggggctttccttttgaaggattgcgcgtctactgattcatcttctcgctctgaaactgaagataatgttgttgagaagtttaaagtcaaagggaaaccaaaaaagaaaagaagaaaagagttgcttaaccgtattcaccaagttggcactcttgctcagatttcaagtatccaaggtgagcaagtcatccttgttggtcgcagaagacttataatagaagagatggtgagtgaagatcctctaaccgtcagagttgaccatctaaaggataagccatatgacaaggacaatgctgtcatcaaggcaagctacgttgaagttatttcgactcttagggaagtcttaaagacaaattcactctggagagatcaagatataggtgacttcagttatcaacatttagctgattttggagccgggatctctggcgctaacaaacataaaaatcagggggttcttacagaactggatgttcataaacgtctagagttgacgttggaattggtgaaaaaacaagtagaaattaacaagattaaagagacagatgacggatcttcactttctgcaaagataagggtaaggattgatactaaaagagacaaaattccaaaacatgtaataaaagtcatggaagaagagtttacaaagctggagatgttagaagaaaactatagcgacttcgatttgacctataactaccttcattggttgaccgtgctgccttggggaaatttcagttatgagaattttgatgtcctacgggcaaaaaagattcttgacgaggatcattacggattatctgatgtaaaagaaagaatattagagtttattgctgtgggaagacttagaggcacttcacaagggaagatcatttgtctctctggcccacctggagtaggtaaaactagcattgggcgttcaattgcacgtgctcttgaccgcaagttcttccggttctctgttggaggactatccgatgttgctgagattaaggggcattgtcaaacatatgttggtgccatgcctggaaagatggtgcaatgtctaaagagtgtgggaacagcaaatcctcttattttgttcgacgagattgataagcttggtaggtgccacactggcgacccagccagtgcgttgttggaggttatggatccagagcagaatgcaaaatttttagaccactttctcaatgttactattgacttatcaaaggttttatttgtatgcactgcaaatgtgatagaaatgattccgggtcctctgctagacagaatggaggtgattgatctctctgggtatgttactgatgagaaaatgcatattgctagagactatttggtgaaaaagacatgcagagattgcggcattaagcctgaacatgttgatttgagtgatgcagctcttctttccttgatagaaaattattgtagagaagcaggagttagaaatctccaaaagcagattgagaagatttaccgtaaggttgctcttgaactagtacgccaaggagcagtttcttttgatgttactgacactaaagatactaaatctttggccaagaccgattcagaggttaagagaatgaaagtggctgatattatgaagatactcgaatcagcaactggggactcaacagaatcaaagactaagcagagcggattggtagctaaaacctttgaaaaggttatgattgatgaatcaaaccttgcagattacgtaggcaaaccagtattccaggaagagaagatctatgaacagacacctgtcggggttgtgatgggtctagcttggacatccatgggtggctcaacgttgtacatcgagacaacctttgtagaagaaggattgggaaaaggtggtcttcatataacgggtcagcttggggatgtgatgaaagaaagcgcacagattgctcacacagtcgctagaagaataatgtttgagaaagaaccggagaacctcttttttgcgaattccaagcttcatttacatgttcctgaaggagccacaccaaaagatggcccaagtgcaggctgcaccatgatcacttcgttcctatcacttgccatgaagaagcttgtaaggaaggatcttgcaatgactggagaagtcactctaactggtagaattcttccaattggtggcgttaaggagaagactatagctgcaagacggagtcagatcaagacaataatattcccggaagcaaatcggagagactttgaggagcttgcggaaaacatgaaagaagggcttgatgttcacttcgtggatgaatatgagaagatattcgatctagcattcaattatgaccattag

SEQ ID NO: 3246 - protein, 924 aa, Arabidopsis thaliana
MMPKRFNTSGFDTTLRLPSYYGFLHLTQSLTLNSRVFYGARHVTPPAIRIGSNPVQSLLLFRAPTQLTGWNRSSRDLLGRRVSFSDRSDGVDLLSSSPILSTNPNLDDSLTVIALPLPHKPLIPGFYMPIHVKDPKVLAALQESTRQQSPYVGAFLLKDCASTDSSSRSETEDNVVEKFKVKGKPKKKRRKELLNRIHQVGTLAQISSIQGEQVILVGRRRLIIEEMVSEDPLTVRVDHLKDKPYDKDNAVIKASYVEVISTLREVLKTNSLWRDQDIGDFSYQHLADFGAGISGANKHKNQGVLTELDVHKRLELTLELVKKQVEINKIKETDDGSSLSAKIRVRIDTKRDKIPKHVIKVMEEEFTKLEMLEENYSDFDLTYNYLHWLTVLPWGNFSYENFDVLRAKKILDEDHYGLSDVKERILEFIAVGRLRGTSQGKIICLSGPPGVGKTSIGRSIARALDRKFFRFSVGGLSDVAEIKGHCQTYVGAMPGKMVQCLKSVGTANPLILFDEIDKLGRCHTGDPASALLEVMDPEQNAKFLDHFLNVTIDLSKVLFVCTANVIEMIPGPLLDRMEVIDLSGYVTDEKMHIARDYLVKKTCRDCGIKPEHVDLSDAALLSLIENYCREAGVRNLQKQIEKIYRKVALELVRQGAVSFDVTDTKDTKSLAKTDSEVKRMKVADIMKILESATGDSTESKTKQSGLVAKTFEKVMIDESNLADYVGKPVFQEEKIYEQTPVGVVMGLAWTSMGGSTLYIETTFVEEGLGKGGLHITGQLGDVMKESAQIAHTVARRIMFEKEPENLFFANSKLHLHVPEGATPKDGPSAGCTMITSFLSLAMKKLVRKDLAMTGEVTLTGRILPIGGVKEKTIAARRSQIKTIIFPEANRRDFEELAENMKEGLDVHFVDEYEKIFDLAFNYDH

SEQ ID NO: 3247 - DNA, 2829 bp, Arabidopsis thaliana
  CDS (1)..(2829)
atgctgaagtttctcactccgactgcttacgcttcccatcacgtgactccggctactcgattccggtctaccccggttaagaatctattgttcaagcaactgactcttctaaccggatggaaccggagttcctacgaattgggtcgtcgttctttttcctccgacttggattccgacacaaagtcttcaactactactgtctcagctaaacctcacctggacgattgtctaacggttatagcattgccattgccccacaagcctcttattcctggcttttacatgccaatatatgtcaaggatcctaaagttcttgcagctttacaagagagtagaagacaacaagctccatatgcaggggctttccttttgaaggatgacgcgtcatctgactcatcttcgagctctgaaactgagaatattctagagaagttgaaaggaaaagagttgattaaccggattcatgaagttggcacacttgcccagatttcaagtatccaaggtgagcaagtcatccttattggtcacagacaacttcgaataacagagatggtgagtgagagtgaagatcccctaaccgtcaaagttgaccatctaaaggataagccatatgacaaggacgatgatgtcatcaaggcaacatactttcaagtgatgtcgacacttagggatgtcttaaagacaacttcactctggagagatcatgttcggacatatacccaggcatgttctcttcatatttggcactgcttgagacatataggtgaattcaattatccaaagttagccgattttggagctgggatctctggcgctaacaaacatcaaaatcagggggttcttgaagaactggatgttcacaaacgtctagagttgacgctggaattggtgaaaaaagaagttgaaattaacaagattcaagaatccatagcaaaagctgttgaagaaaaatttagtggcgatagacgtcgtatcatactaaaggagcagatcaatgctataaaaaaggagcttggcggggagacagacagcaaatctgcactttctgaaaagtttagggggaggattgaccctattaaagacaagattccaggacatgtactaaaagtcatagaagaagagcttaaaaaactgcagctgttagaaaccagttctagcgaattcgatgtgacttgtaactaccttgattggttgaccgtgttgccttggggaaatttcagtgatgagaattttaatgtcctacgggcagaaaagattcttgacgaggatcattacggattatctgatgtaaaagaaagaatactagagtttattgctgtgggaggacttagaggcacttcacaagggaagatcatttgtctctctggcccaactggagtaggtaaaactagcattgggcgttcaattgcacgtgctcttgaccgcaagttcttccggttctctgttggaggactatccgatgttgctgagattaaggggcatcgtcgaacgtatattggtgccatgcctggaaagatggtgcagtgtctaaagaatgtgggaacagaaaatcctcttgttctgatcgatgagattgataagcttggagttaggggccaccatggcgacccagccagtgcaatgttggagcttttggatccagagcagaatgcaaattttctagaccactatctcgatgttcctattgacttatccaaggttttatttgtatgcacagcaaacgtgacagataccattccgggtcctctgctagacagaatggaggtgatcactctctcagggtacattactgatgagaaaatgcatatcgctagagactatttggagaaaaccgcacgcagagattgtggcattaagcctgaacaggttgatgtgagcgatgcagcttttctttccttgatagaacattactgcagagaagcaggagttagaaatctccagaagcagattgagaagatttttcgtaagattgctcttaaacttgttcgcaaagcggcatccaccgaagtgcctagaatttctgatgatgttactactgacactgaagaaactaaatctttggccaagactgatttggaatctccagagacctctgcagaaggatccactgtgttgacagatgagttggcaactggggatccaacagaatcaacgactgagcagagcggagaggtagctgaaacggttgaaaagtatatgattgatgaatcaaacctttcagattatgtaggcaagccagtattccaggaagagaagatatatgagcagacaccagtcggggttgtaatgggtctagcttggacatccatggggggctcaacattgtacatagagacaacctttgtagaagaaggagaaggcaaaggtggtcttcatataacgggtcggcttggggatgtgatgaaagaaagcgcagagatagctcacacagtcgcgagaagaataatgctggagaaagaacccgagaacaagttgtttgcgaattccaagcttcatctacatgtacctgcaggagccacaccaaaagacggcccaagcgcaggctgcaccatgataacttcattgctatcacttgccttgaagaagcctgtaaggaaggatcttgcaatgactggagaagtcactttgaccggtagaatccttgcgattggcggcgtgaaagagaagactatagctgcaagacggagtcaagtgaaggtgataatattccctgaggctaaccggagagattttgatgagctggcgagaaacgtgaaagaagggctcgaagttcatttcgtggatgaatatgagcagattttcgagctagcctttggctatgaccattag

SEQ ID NO: 3248 - protein, 942 aa, Arabidopsis thaliana
MLKFLTPTAYASHHVTPATRFRSTPVKNLLFKQLTLLTGWNRSSYELGRRSFSSDLDSDTKSSTTTVSAKPHLDDCLTVIALPLPHKPLIPGFYMPIYVKDPKVLAALQESRRQQAPYAGAFLLKDDASSDSSSSSETENILEKLKGKELINRIHEVGTLAQISSIQGEQVILIGHRQLRITEMVSESEDPLTVKVDHLKDKPYDKDDDVIKATYFQVMSTLRDVLKTTSLWRDHVRTYTQACSLHIWHCLRHIGEFNYPKLADFGAGISGANKHQNQGVLEELDVHKRLELTLELVKKEVEINKIQESIAKAVEEKFSGDRRRIILKEQINAIKKELGGETDSKSALSEKFRGRIDPIKDKIPGHVLKVIEEELKKLQLLETSSSEFDVTCNYLDWLTVLPWGNFSDENFNVLRAEKILDEDHYGLSDVKERILEFIAVGGLRGTSQGKIICLSGPTGVGKTSIGRSIARALDRKFFRFSVGGLSDVAEIKGHRRTYIGAMPGKMVQCLKNVGTENPLVLIDEIDKLGVRGHHGDPASAMLELLDPEQNANFLDHYLDVPIDLSKVLFVCTANVTDTIPGPLLDRMEVITLSGYITDEKMHIARDYLEKTARRDCGIKPEQVDVSDAAFLSLIEHYCREAGVRNLQKQIEKIFRKIALKLVRKAASTEVPRISDDVTTDTEETKSLAKTDLESPETSAEGSTVLTDELATGDPTESTTEQSGEVAETVEKYMIDESNLSDYVGKPVFQEEKIYEQTPVGVVMGLAWTSMGGSTLYIETTFVEEGEGKGGLHITGRLGDVMKESAEIAHTVARRIMLEKEPENKLFANSKLHLHVPAGATPKDGPSAGCTMITSLLSLALKKPVRKDLAMTGEVTLTGRILAIGGVKEKTIAARRSQVKVIIFPEANRRDFDELARNVKEGLEVHFVDEYEQIFELAFGYDH

SEQ ID NO: 3249 - DNA, 3204 bp, Schizosaccharomyces pombe
  CDS (1)..(3204)
atgattacacgtttatcgggcgcttgcttgaggcgatcaggtgctaaaagaaattggcctcgtgaacatttggttcatcggtctttgcttgctagtttttccactacacagagggttttaaaatgctcagtcggaccttttcgtacttcaaatgttgttttcaaaagtaaagaaccaaaagataacaaaccactggataacaaaaacgatcccaaaaagacacataatgaagatgagtcacataccaacgaatctttgccatctacggataaaaagaaaaaaaaggataatgacgattttaagcaaaatttgaaatcttcttcaaataagactgaggaaaagtattctgctacacaagcttctaagtctaaaaatgacgaatttgaattaggtggtgaagaaaatgaggatgaaatgcctttaaatggggaatttaataaaaatgttccggccaaatattcggttcctgatgtgtatcctcaattacttgcgttacccattgcgcgacgacctcttttccctggtttttataaagccatagttaccaaaaatccctctgtttcagaggccattaaagaactgattaaaaagagacaaccttatatcggcgcgtttttgttgaaggatgaaaacactgataccgatgttataacgaacattgatcaggtttacccggtcggtgttttcgctcaaatcaccagtatttttccagcaaaaagtggtagtgaacctgcattgactgctgttttataccctcaccgtaggatacgaataactgaactgatacctccaaaagaggatgctgatagcgctgcttcttcagacgcagcagaacttgaaaccgataaaagctctaatctttcttccaatggagaagttaagtctgatctcaaacaagacaatgggaaagaggaacctgaaaaggaagttgaaagcacaccctcaattcttcaaaactttaaagtctctcttgttaatgtcgaaaacgttcctaatgaaccttttaaacgacaggatcctgtaattaaggcggtaacgtctgagattatgaatgttttcaaagatattgcaaacgttagtcccctctttcgtgaacaaattgccaatttttcaatatcgcaaacgtctggcaatgtttttgatgaacctgctaaattggcagattttgctgccgctgtttcggctgcagatcatcgcgaattacaggaggttttagaagctacaaatataggagatcgtttgcaaaaggctttgtatgtactaaaaaaggaactattgaatgcccaacttcagcataaaattaacaaggaaattgagcagaagataactcaacgccataaagaatatcttttaaccgaacagctaaagcaaattaaaagagaacttggacaagaacttgatagcaaagaagcattagtaactgagttcaagaaacgaactgaaagcttgagtatgcctgatcacgtgaaaaaggttttcaatgatgaactgtccaaatttcagcatttagaaccaatggctgctgaatttaacattactcgtaattatttggactggataacccaacttccttggggaaagaggtctgttgaaaatttcgatttagatcatgcaaaggaagtccttgatcgagatcattatgggcttaaagatgttaaggatcgtgttcttgagttagtagctgtaggtaagctaagaggaactatgcaaggaaagattatgtgtttagttggtccgccaggtgtcggtaagacttctgttggaaaatctattgcatctgccttaaacagggaattctttcgcttcagtgtgggcggtctgactgatgtcgctgaaatcaaaggacatcgtcgtacctatatcggagcaatgcctggaaaaattgtgcaagctttgaaaaaggtgcaaactgagaaccctttgattcttattgatgaaatagacaaagtgggcaaaagtcatcaaggggatcctgcgagtgcacttttagagcttttagattcagaacagaactcagctttcctagattactatatggatattccactcgatgtttcatctgttttatttgtctgcacggcgaacaccattgatactattcctccacctttgttggatcgtatggaggttattgaactatctggatatgtttcagctgaaaaagttaacattgctaaaggttatcttataccccaagccaaagctgcttgtggtttaaaggatgctaatgtgaatatcagtgatgacgctattaagggtttaattagttactatgctcatgaaagcggtgtacgaaatttgaaaaaatctattgagaaaatatttcgtaaaacatcttttagtattgttaaagaaattgacgatgaattaaattctaaagagaagtctacgggtaagtcgggaaagaaaacatctcctcaatcatcagaagatgcagcaaacaaagaagcatcatctgttccgttaaaagttcccgataaagttaatatcgagattgaagaaaaggacttgactaaatatttgggtccccccatttatacttctcagcgactttatgacactactcctcctggtgttgtcatgggacttggttggacacccatgggaggtgtttcgatgtatgtagaaactattgttaaaaacattttatcatccaattctactccctctttggaaaggacggggcaactgggagatgtgatgaaagagtcatctgaaatttcgtattccttttcaaaaagctttttgtctaagcattttccaaataataaattttttgaacatgcgcgtttgcatatgcattgtcccgaaggctccatttctaaggatggcccatcagcaggtatcacaatggctacatctttactttctttagcattggatactccggtaccagcgactactgccatgactggtgagctaaccttgaccggtaaaattttacgcattggtggcttacgagaaaagacggttgctgccaaattatctggtatgaaagaaatactatttccaaaaagtaacttagccgattgggaacaacttcctgattatgttaaagaaggtttaactggtgtccctgttgcatggtatgatgatgtttttaaacgggttttttcaaacattgatgccgaaaaatgcaacaatctttggccaaatttaataaagtcatcctccaagcagcatcaaatttcacccagtcattaa

SEQ ID NO: 3250 - protein, 1067 aa, Schizosaccharomyces pombe
MITRLSGACLRRSGAKRNWPREHLVHRSLLASFSTTQRVLKCSVGPFRTSNVVFKSKEPKDNKPLDNKNDPKKTHNEDESHTNESLPSTDKKKKKDNDDFKQNLKSSSNKTEEKYSATQASKSKNDEFELGGEENEDEMPLNGEFNKNVPAKYSVPDVYPQLLALPIARRPLFPGFYKAIVTKNPSVSEAIKELIKKRQPYIGAFLLKDENTDTDVITNIDQVYPVGVFAQITSIFPAKSGSEPALTAVLYPHRRIRITELIPPKEDADSAASSDAAELETDKSSNLSSNGEVKSDLKQDNGKEEPEKEVESTPSILQNFKVSLVNVENVPNEPFKRQDPVIKAVTSEIMNVFKDIANVSPLFREQIANFSISQTSGNVFDEPAKLADFAAAVSAADHRELQEVLEATNIGDRLQKALYVLKKELLNAQLQHKINKEIEQKITQRHKEYLLTEQLKQIKRELGQELDSKEALVTEFKKRTESLSMPDHVKKVFNDELSKFQHLEPMAAEFNITRNYLDWITQLPWGKRSVENFDLDHAKEVLDRDHYGLKDVKDRVLELVAVGKLRGTMQGKIMCLVGPPGVGKTSVGKSIASALNREFFRFSVGGLTDVAEIKGHRRTYIGAMPGKIVQALKKVQTENPLILIDEIDKVGKSHQGDPASALLELLDSEQNSAFLDYYMDIPLDVSSVLFVCTANTIDTIPPPLLDRMEVIELSGYVSAEKVNIAKGYLIPQAKAACGLKDANVNISDDAIKGLISYYAHESGVRNLKKSIEKIFRKTSFSIVKEIDDELNSKEKSTGKSGKKTSPQSSEDAANKEASSVPLKVPDKVNIEIEEKDLTKYLGPPIYTSQRLYDTTPPGVVMGLGWTPMGGVSMYVETIVKNILSSNSTPSLERTGQLGDVMKESSEISYSFSKSFLSKHFPNNKFFEHARLHMHCPEGSISKDGPSAGITMATSLLSLALDTPVPATTAMTGELTLTGKILRIGGLREKTVAAKLSGMKEILFPKSNLADWEQLPDYVKEGLTGVPVAWYDDVFKRVFSNIDAEKCNNLWPNLIKSSSKQHQISPSH

SEQ ID NO: 3251 - DNA, 3018 bp, Zea mays
  CDS (1)..(3018)
atgctgcgtgcggcggcggctgcagccgccatcttcccggcgcggttcgccgccgcgccggctgtggcggcggcggaggagctcaggtctccgctgctcagggtcattgggacgctgagggacggccgcggctcggtgctgctgggtaggagggtgcgtttctgctccaactcttccgcgagcgacaccgaggcggcggtggcagaggcggaggcgaaggccgaggatgcgtccgctgcggagggtgaggcggacagcaaggcgtcttccgccatcgtgccgaccagcaccaatatcgatgattgcctcgttatagcgttacctcttccacatcggccactctttcctggattctacatgccgatcaatgtgaaggaccaaaagctgctgcaagccctaatagaaaatcgcaaaagatcagctccgtatgctggtgcctttcttgtgaaagatgaagaaggtactgaccctaacatcgtgactggttcagattcagcgaaaagcattgatgatctcaaagggaaagacttgctgaagcgtcttcatgaagttgggacgcttgctcagattacaagcattcaaggggatcatgtagttctacttggtcaccgacgtttacggataactgagatggtcgaagaggatccacttacagttaaagttgaccatctaaaggaaaagccctacaacaaggacgatgatgttatgaaagctacatcattcgaagttatatcaactttaagggaagttctaaggacaagttccctttggaaggatcatgtgcaaacctacacacagcacattggtgactttaactaccaacggttagcagactttggtgctgctatctctggtgccaacaagttgctttgccaggaagttcttgaggaattggatgtatacaagcgtttgaagttgacccttgagttagtaaaaaaggagatggagattagtaagctacagcaatccatagcaaaagcaattgaagaaaagattagtggagatcagcgacgttatttattgaacgagcaacttaaggcaatcaagaaggagttgggtttggagactgatgacaaaacagcattgtctgcaaaatttagagaacgtatagaatcaaagaaggacaaatgtcctcctcatgttttacaagtcattgaagaagagcttaccaagcttcagcttttagaagccagctctagtgagttcagtgtaactcgtaattatttggactggctgacagtgttgccatggggaaattatagtgatgaaaacttcgatgtccaccatgctcagaaaattctcgatgaagaccattatggtttgagtgatgtgaaagagaggatactggaattcatagcagttgggaagttaagagggacttcacaaggcaagatcatatgtctttctgggccaccgggagttggaaaaaccagtattggtcgttcaattgcacgtgcactgaaccgtcagttctacaggttttctgttggaggtttggctgatgtggctgaaatcaagggccatcgacgcacatatgttggtgcaatgccagggaagatggtgcagtgtcttaaatcagttggtacagcaaatcctctagtgttgatagatgagattgacaagcttgggaagggtcattctggcgatccagctagtgcattgttggaactccttgaccctgagcagaatgttaatttcttagatcactaccttgatgttcctattgacctatccaaggttctatttgtttgcacagcaaacgtaatagagatgataccaaatccattactggataggatggagatcattgctatagctgggtatataactgatgagaagatgcatattgctcgggactatctagagaagaatacaagacaggcttgtggcattaagcctgagcaggggttcgggggttttcttgacctgtgtgagaaggtcttcttcttaatacaatgcccgggggctgtcttacccccgcaggttgaagttacagatactgctcttcttgctctcattgaaaactactgtcgagaagctggagtgaggaaccttcaaaagcagattgagaaaatttaccgtaagatagctctgcagcttgttcgccaaggagtatcgaatgagccagaccatgagtctgtcagtgcctctgtaactgaggaatctggtaatggtgataacaccacaacaaaagatgagattttgaaggatcctgctgtagaagatgcttcagtcaccaacaatgttacaaatcctgcctccgaggaagctaatgaagaaaatttgacaagtgaagcagcaaaagaagacagcacatctaagggcaacaagggcactgatggagcagcggacaaggcaattgagaaggttgtggtcgattcatcaaaccttggtgattttgttgggaaacctgtgttccaggctgagcgtatatatgagcatactccagttggagtggtcatgggtttagcttggactgctatgggtggttctactttgtacatcgaaacaaaaaaagtggaggaaagggaagggaaaggtgcacttgtgcttacaggacagcttggagatgtcatgaaagagagtgctcagattgcgcacacagttggcagagctgtattactggagaaagagccagataaccatttttttgcaaactcgaaggtgcacttgcatgttcctgcagggtccacccctaaggatggccctagtgctggatgcaccatgataacatctatgctgtccttagctatgggaaagcctgtcaagaaggacctcgcaatgacgggtgaagtaacactaaccggaagaatcctcccaatcggcggggtaaaagagaaaacaattgcggcaaggagaagtgcgataaagacactcatatttccggcagcgaataaaagggatttcgatgagcttgcttctaatgtgaaggaaggcctcgaagttcattttgttgacacatacagtgaaatatatgatttagctttccagagtgacgccgggacagaaacaagctga

SEQ ID NO: 3252 - protein, 1005 aa, Zea mays
MLRAAAAAAAIFPARFAAAPAVAAAEELRSPLLRVIGTLRDGRGSVLLGRRVRFCSNSSASDTEAAVAEAEAKAEDASAAEGEADSKASSAIVPTSTNIDDCLVIALPLPHRPLFPGFYMPINVKDQKLLQALIENRKRSAPYAGAFLVKDEEGTDPNIVTGSDSAKSIDDLKGKDLLKRLHEVGTLAQITSIQGDHVVLLGHRRLRITEMVEEDPLTVKVDHLKEKPYNKDDDVMKATSFEVISTLREVLRTSSLWKDHVQTYTQHIGDFNYQRLADFGAAISGANKLLCQEVLEELDVYKRLKLTLELVKKEMEISKLQQSIAKAIEEKISGDQRRYLLNEQLKAIKKELGLETDDKTALSAKFRERIESKKDKCPPHVLQVIEEELTKLQLLEASSSEFSVTRNYLDWLTVLPWGNYSDENFDVHHAQKILDEDHYGLSDVKERILEFIAVGKLRGTSQGKIICLSGPPGVGKTSIGRSIARALNRQFYRFSVGGLADVAEIKGHRRTYVGAMPGKMVQCLKSVGTANPLVLIDEIDKLGKGHSGDPASALLELLDPEQNVNFLDHYLDVPIDLSKVLFVCTANVIEMIPNPLLDRMEIIAIAGYITDEKMHIARDYLEKNTRQACGIKPEQGFGGFLDLCEKVFFLIQCPGAVLPPQVEVTDTALLALIENYCREAGVRNLQKQIEKIYRKIALQLVRQGVSNEPDHESVSASVTEESGNGDNTTTKDEILKDPAVEDASVTNNVTNPASEEANEENLTSEAAKEDSTSKGNKGTDGAADKAIEKVVVDSSNLGDFVGKPVFQAERIYEHTPVGVVMGLAWTAMGGSTLYIETKKVEEREGKGALVLTGQLGDVMKESAQIAHTVGRAVLLEKEPDNHFFANSKVHLHVPAGSTPKDGPSAGCTMITSMLSLAMGKPVKKDLAMTGEVTLTGRILPIGGVKEKTIAARRSAIKTLIFPAANKRDFDELASNVKEGLEVHFVDTYSEIYDLAFQSDAGTETS

SEQ ID NO: 3253 - DNA, 25 bp, Artificial sequence
  primer
atgctaagaacaagaaccacaaaga

SEQ ID NO: 3254 - DNA, 25 bp, Artificial sequence
  primer
ttagtccttttcctttttagcatcc

SEQ ID NO: 3255 - protein, 1160 aa, Artificial sequence
  consensus sequence
  Variant (2)..(5): Xaa in position 2 to 5 is any amino acid
  Variant (6)..(6): Xaa in position 6 is any or no amino acid
  Variant (8)..(15): Xaa in position 8 to 15 is any amino acid
  Variant (20)..(20): Xaa in position 20 is any amino acid
  Variant (22)..(44): Xaa in position 22 to 44 is any amino acid
  Variant (45)..(46): Xaa in position 45 to 46 is any or no amino acid
  Variant (49)..(49): Xaa in position 49 is any amino acid
  Variant (51)..(51): Xaa in position 51 is any amino acid
  Variant (54)..(54): Xaa in position 54 is any amino acid
  Variant (56)..(72): Xaa in position 56 to 72 is any amino acid
  Variant (73)..(102): Xaa in position 73 to 102 is any or no amino acid
  Variant (104)..(105): Xaa in position 104 to 105 is any amino acid
  Variant (109)..(120): Xaa in position 109 to 120 is any amino acid
  Variant (121)..(145): Xaa in position 121 to 145 is any or no amino acid
  Variant (149)..(150): Xaa in position 149 to 150 is any amino acid
  Variant (152)..(161): Xaa in position 152 to 161 is any amino acid
  Variant (162)..(268): Xaa in position 162 to 268 is any or no amino acid
  Variant (270)..(270): Xaa in position 270 is any amino acid
  Variant (272)..(275): Xaa in position 272 to 275 is any amino acid
  Variant (276)..(288): Xaa in position 276 to 288 is any or no amino acid
  Variant (290)..(292): Xaa in position 290 to 292 is any amino acid
  Variant (294)..(301): Xaa in position 294 to 301 is any amino acid
  Variant (302)..(337): Xaa in position 302 to 337 is any or no amino acid
  Variant (339)..(339): Xaa in position 339 is any amino acid
  Variant (341)..(342): Xaa in position 341 to 342 is any amino acid
  Variant (344)..(353): Xaa in position 344 to 353 is any amino acid
  Variant (355)..(356): Xaa in position 355 to 356 is any amino acid
  Variant (359)..(361): Xaa in position 359 to 361 is any amino acid
  Variant (362)..(364): Xaa in position 362 to 364 is any or no amino acid
  Variant (367)..(369): Xaa in position 367 to 369 is any amino acid
  Variant (371)..(371): Xaa in position 371 is any amino acid
  Variant (373)..(373): Xaa in position 373 is any amino acid
  Variant (377)..(381): Xaa in position 377 to 381 is any amino acid
  Variant (384)..(384): Xaa in position 384 is any amino acid
  Variant (385)..(385): Xaa in position 385 is any or no amino acid
  Variant (387)..(390): Xaa in position 387 to 390 is any amino acid
  Variant (391)..(397): Xaa in position 391 to 397 is any or no amino acid
  Variant (399)..(399): Xaa in position 399 is any amino acid
  Variant (401)..(405): Xaa in position 401 to 405 is any amino acid
  Variant (407)..(407): Xaa in position 407 is any amino acid
  Variant (409)..(409): Xaa in position 409 is any amino acid
  Variant (411)..(411): Xaa in position 411 is any amino acid
  Variant (416)..(416): Xaa in position 416 is any amino acid
  Variant (423)..(423): Xaa in position 423 is any amino acid
  Variant (425)..(425): Xaa in position 425 is any amino acid
  Variant (427)..(427): Xaa in position 427 is any amino acid
  Variant (429)..(433): Xaa in position 429 to 433 is any amino acid
  Variant (435)..(444): Xaa in position 435 to 444 is any amino acid
  Variant (445)..(446): Xaa in position 445 to 446 is any or no amino acid
  Variant (448)..(452): Xaa in position 448 to 452 is any amino acid
  Variant (454)..(455): Xaa in position 454 to 455 is any amino acid
  Variant (459)..(459): Xaa in position 459 is any amino acid
  Variant (462)..(463): Xaa in position 462 to 463 is any amino acid
  Variant (466)..(466): Xaa in position 466 is any amino acid
  Variant (467)..(468): Xaa in position 467 to 468 is any or no amino acid
  Variant (472)..(472): Xaa in position 472 is any amino acid
  Variant (483)..(484): Xaa in position 483 to 484 is any amino acid
  Variant (488)..(489): Xaa in position 488 to 489 is any amino acid
  Variant (490)..(501): Xaa in position 490 to 501 is any or no amino acid
  Variant (503)..(503): Xaa in position 503 is any amino acid
  Variant (506)..(510): Xaa in position 506 to 510 is any amino acid
  Variant (512)..(514): Xaa in position 512 to 514 is any amino acid
  Variant (516)..(517): Xaa in position 516 to 517 is any amino acid
  Variant (522)..(523): Xaa in position 522 to 523 is any amino acid
  Variant (525)..(525): Xaa in position 525 is any amino acid
  Variant (527)..(527): Xaa in position 527 is any amino acid
  Variant (536)..(537): Xaa in position 536 to 537 is any amino acid
  Variant (539)..(539): Xaa in position 539 is any amino acid
  Variant (541)..(543): Xaa in position 541 to 543 is any amino acid
  Variant (547)..(547): Xaa in position 547 is any amino acid
  Variant (549)..(550): Xaa in position 549 to 550 is any amino acid
  Variant (561)..(562): Xaa in position 561 to 562 is any amino acid
  Variant (571)..(573): Xaa in position 571 to 573 is any amino acid
  Variant (580)..(581): Xaa in position 580 to 581 is any amino acid
  Variant (597)..(597): Xaa in position 597 is any amino acid
  Variant (600)..(602): Xaa in position 600 to 602 is any amino acid
  Variant (604)..(604): Xaa in position 604 is any amino acid
  Variant (607)..(609): Xaa in position 607 to 609 is any amino acid
  Variant (611)..(611): Xaa in position 611 is any amino acid
  Variant (615)..(615): Xaa in position 615 is any amino acid
  Variant (620)..(620): Xaa in position 620 is any amino acid
  Variant (623)..(623): Xaa in position 623 is any amino acid
  Variant (625)..(625): Xaa in position 625 is any amino acid
  Variant (626)..(628): Xaa in position 626 to 628 is any or no amino acid
  Variant (630)..(631): Xaa in position 630 to 631 is any amino acid
  Variant (635)..(635): Xaa in position 635 is any amino acid
  Variant (641)..(641): Xaa in position 641 is any amino acid
  Variant (648)..(649): Xaa in position 648 to 649 is any amino acid
  Variant (658)..(659): Xaa in position 658 to 659 is any amino acid
  Variant (663)..(663): Xaa in position 663 is any amino acid
  Variant (667)..(667): Xaa in position 667 is any amino acid
  Variant (672)..(675): Xaa in position 672 to 675 is any amino acid
  Variant (678)..(678): Xaa in position 678 is any amino acid
  Variant (681)..(681): Xaa in position 681 is any amino acid
  Variant (686)..(686): Xaa in position 686 is any amino acid
  Variant (688)..(690): Xaa in position 688 to 690 is any amino acid
  Variant (693)..(695): Xaa in position 693 to 695 is any amino acid
  Variant (698)..(699): Xaa in position 698 to 699 is any amino acid
  Variant (702)..(703): Xaa in position 702 to 703 is any amino acid
  Variant (706)..(713): Xaa in position 706 to 713 is any amino acid
  Variant (715)..(722): Xaa in position 715 to 722 is any amino acid
  Variant (723)..(751): Xaa in position 723 to 751 is any or no amino acid
  Variant (753)..(755): Xaa in position 753 to 755 is any amino acid
  Variant (758)..(759): Xaa in position 758 to 759 is any amino acid
  Variant (764)..(764): Xaa in position 764 is any amino acid
  Variant (770)..(770): Xaa in position 770 is any amino acid
  Variant (772)..(772): Xaa in position 772 is any amino acid
  Variant (776)..(777): Xaa in position 776 to 777 is any amino acid
  Variant (780)..(780): Xaa in position 780 is any amino acid
  Variant (782)..(784): Xaa in position 782 to 784 is any amino acid
  Variant (786)..(797): Xaa in position 786 to 797 is any amino acid
  Variant (798)..(940): Xaa in position 798 to 940 is any or no amino acid
  Variant (943)..(946): Xaa in position 943 to 946 is any amino acid
  Variant (948)..(950): Xaa in position 948 to 950 is any amino acid
  Variant (952)..(954): Xaa in position 952 to 954 is any amino acid
  Variant (956)..(956): Xaa in position 956 is any amino acid
  Variant (958)..(959): Xaa in position 958 to 959 is any amino acid
  Variant (962)..(962): Xaa in position 962 is any amino acid
  Variant (963)..(963): Xaa in position 963 is any or no amino acid
  Variant (973)..(973): Xaa in position 973 is any amino acid
  Variant (976)..(976): Xaa in position 976 is any amino acid
  Variant (978)..(979): Xaa in position 978 to 979 is any amino acid
  Variant (984)..(992): Xaa in position 984 to 992 is any amino acid
  Variant (993)..(1007): Xaa in position 993 to 1007 is any or no amino acid
  Variant (1009)..(1010): Xaa in position 1009 to 1010 is any amino acid
  Variant (1013)..(1013): Xaa in position 1013 is any amino acid
  Variant (1022)..(1023): Xaa in position 1022 to 1023 is any amino acid
  Variant (1026)..(1037): Xaa in position 1026 to 1037 is any amino acid
  Variant (1038)..(1041): Xaa in position 1038 to 1041 is any or no amino acid
  Variant (1043)..(1043): Xaa in position 1043 is any amino acid
  Variant (1045)..(1045): Xaa in position 1045 is any amino acid
  Variant (1047)..(1052): Xaa in position 1047 to 1052 is any amino acid
  Variant (1056)..(1056): Xaa in position 1056 is any amino acid
  Variant (1058)..(1058): Xaa in position 1058 is any amino acid
  Variant (1060)..(1061): Xaa in position 1060 to 1061 is any amino acid
  Variant (1070)..(1070): Xaa in position 1070 is any amino acid
  Variant (1072)..(1073): Xaa in position 1072 to 1073 is any amino acid
  Variant (1075)..(1077): Xaa in position 1075 to 1077 is any amino acid
  Variant (1081)..(1089): Xaa in position 1081 to 1089 is any amino acid
  Variant (1095)..(1096): Xaa in position 1095 to 1096 is any amino acid
  Variant (1098)..(1098): Xaa in position 1098 is any amino acid
  Variant (1100)..(1101): Xaa in position 1100 to 1101 is any amino acid
  Variant (1103)..(1104): Xaa in position 1103 to 1104 is any amino acid
  Variant (1107)..(1108): Xaa in position 1107 to 1108 is any amino acid
  Variant (1111)..(1112): Xaa in position 1111 to 1112 is any amino acid
  Variant (1115)..(1115): Xaa in position 1115 is any amino acid
  Variant (1117)..(1122): Xaa in position 1117 to 1122 is any amino acid
  Variant (1124)..(1124): Xaa in position 1124 is any amino acid
  Variant (1126)..(1127): Xaa in position 1126 to 1127 is any amino acid
  Variant (1129)..(1130): Xaa in position 1129 to 1130 is any amino acid
  Variant (1132)..(1133): Xaa in position 1132 to 1133 is any amino acid
  Variant (1135)..(1135): Xaa in position 1135 is any amino acid
  Variant (1137)..(1141): Xaa in position 1137 to 1141 is any amino acid
  Variant (1142)..(1142): Xaa in position 1142 is any or no amino acid
  Variant (1145)..(1151): Xaa in position 1145 to 1151 is any amino acid
  Variant (1153)..(1159): Xaa in position 1153 to 1159 is any amino acid
PXXXXXVXXXXXXXXPLFPXFXXXXXXXXXXXXXXXXXXXXXXXXXPYXGXFLXKXXXXXXXXXXXXXXXXXXXXXXXXXXXXXXXXXXXXXXXXXXXXXXXGXXAQIXXXXXXXXXXXXXXXXXXXXXXXXXXXXXXXXXXXXXHRRXXIXXXXXXXXXXXXXXXXXXXXXXXXXXXXXXXXXXXXXXXXXXXXXXXXXXXXXXXXXXXXXXXXXXXXXXXXXXXXXXXXXXXXXXXXXXXXXXXXXXXXXXXXXXXXXXXXXXXXXVXVXXXXXXXXXXXXXXXXXAXXXEXXXXXXXXXXXXXXXXXXXXXXXXXXXXXXXXXXXXXXXXXXXXLXDXXAXXXXXXXXXXQXXLEXXXXXXRLXXXLXLXKKEXXXXXLQXXIXXXXXXXXXXXEXKXXXXXRXYXLXEQLKXIKKELGXEXDXKXXXXXKXXXXXXXXXXXXPXXXXXVXXEELXKLXXLEXXXSEFXVTRNYLDWLTXXPWGXXXXXXXXXXXXXXSXENXXXXXAXXXLXXDHYGXXDXKXRILEFIAVXXLXGXXXGKIXCXXGPPGVGKTSIXXSIARALNRXXXRFSVGGXXDVAEIKGHRRTYVGAXPGXXXQXLKXXXTXNPLXLIDEXDKXGXXXXGXXGDPXSALLEXLDPEQNXXFLDHYLDVXXDLSXVLFXCTANXXXXIPXPLXDRMEXIXXXGYXXXEKXXIAXXYLXXXXXXXXGXXXXXXXXXXXXXXXXXXXXXXXXXXXXXXXXXXXXXAXXXLIXXYCREXGVRNLXKXIEKXXRKXAXXXVXXXXXXXXXXXXXXXXXXXXXXXXXXXXXXXXXXXXXXXXXXXXXXXXXXXXXXXXXXXXXXXXXXXXXXXXXXXXXXXXXXXXXXXXXXXXXXXXXXXXXXXXXXXXXXXXXXXXXXXXXXXXXXXXXXXXXXXXXXXXXXXXXXXXXXXXXXXNLXXXXGXXXFXXXRXYXXTPXXGVVMGLAWTXMGXGXXLYIEXXXXXXXXXXXXXXXXXXXXXXXXLXXTGXLGDVMKESXXIAXXXXXXXXXXXXXXXXPXNXFXXXXXXHLHXPXGXXPKDGPSAGXTXXTXXXSLAXXXXXXXXXAMTGEXXLXGXXLXXGGXXEKXXAAXRXXXXXXIXPXXNXXDXXEXLXXXXXXGLXXXXXXXYXXXXXXXF

SEQ ID NO: 3256 - protein, 41 aa, Artificial sequence
  protein pattern
  Variant (2)..(2): Xaa in position 2 is Leu or Val
  Variant (3)..(3): Xaa in position 3 is Asp, Glu, Gly, Asn or Ser
  Variant (5)..(5): Xaa in position 5 is any amino acid
  Variant (6)..(6): Xaa in position 6 is any or no amino acid
  Variant (8)..(8): Xaa in position 8 is any or no amino acid
  Variant (15)..(15): Xaa in position 15 is Leu or Met
  Variant (16)..(16): Xaa in position 16 is any amino acid
  Variant (18)..(18): Xaa in position 18 is Ile or Val
  Variant (29)..(29): Xaa in position 29 is Ile or Val
  Variant (32)..(32): Xaa in position 32 is Ile, Leu or Met
  Variant (35)..(35): Xaa in position 35 is Lys or Arg
  Variant (36)..(36): Xaa in position 36 is any amino acid
  Variant (37)..(37): Xaa in position 37 is Ile or Val
  Variant (39)..(39): Xaa in position 39 is Ala or Cys
AXXRXXFXRFSVGGXXDXAEIKGHRRTYXGAXPGXXXQXLK

SEQ ID NO: 3257 - protein, 58 aa, Artificial sequence
  protein pattern
  Variant (2)..(3): Xaa in position 2 to 3 is any amino acid
  Variant (7)..(7): Xaa in position 7 is Ala or Ser
  Variant (8)..(8): Xaa in position 8 is Ala, Asn or Ser
  Variant (13)..(13): Xaa in position 13 is any or no amino acid
  Variant (15)..(15): Xaa in position 15 is any or no amino acid
  Variant (21)..(21): Xaa in position 21 is any amino acid
  Variant (22)..(22): Xaa in position 22 is Asn or Ser
  Variant (26)..(26): Xaa in position 26 is any amino acid
  Variant (28)..(28): Xaa in position 28 is Leu or Met
  Variant (30)..(30): Xaa in position 30 is Ile or Val
  Variant (31)..(31): Xaa in position 31 is Ala, Pro, Ser or Thr
  Variant (32)..(32): Xaa in position 32 is Ile or Val
  Variant (36)..(36): Xaa in position 36 is Lys or Arg
  Variant (40)..(40): Xaa in position 40 is Ile or Val
  Variant (44)..(44): Xaa in position 44 is Asp or Asn
  Variant (45)..(46): Xaa in position 45 to 46 is any amino acid
  Variant (47)..(47): Xaa in position 47 is Asp, Glu or Asn
  Variant (48)..(48): Xaa in position 48 is any amino acid
  Variant (51)..(51): Xaa in position 51 is any amino acid
  Variant (54)..(54): Xaa in position 54 is any amino acid
GXXGDPXXALLEXLXDPEQNXXFLDXYXDXXXDLSXVLFXCTAXXXXXIPXPLXDRME

SEQ ID NO: 3258 - protein, 41 aa, Artificial sequence
  protein pattern
  Variant (2)..(3): Xaa in position 2 to 3 is any or no amino acid
  Variant (6)..(6): Xaa in position 6 is Leu or Met
  Variant (7)..(7): Xaa in position 7 is any amino acid
  Variant (9)..(9): Xaa in position 9 is Ile or Val
  Variant (11)..(11): Xaa in position 11 is Asp, Glu, Lys or Arg
  Variant (18)..(18): Xaa in position 18 is Ala or Ser
  Variant (20)..(20): Xaa in position 20 is Gly or Ser
  Variant (21)..(21): Xaa in position 21 is any amino acid
  Variant (22)..(22): Xaa in position 22 is Ile or Leu
  Variant (23)..(23): Xaa in position 23 is any amino acid
  Variant (25)..(25): Xaa in position 25 is any amino acid
  Variant (26)..(26): Xaa in position 26 is Ser, Thr or Val
  Variant (27)..(27): Xaa in position 27 is Asp, Glu or Gln
  Variant (31)..(31): Xaa in position 31 is Ile or Leu
  Variant (32)..(32): Xaa in position 32 is Cys or Thr
  Variant (33)..(33): Xaa in position 33 is Phe, Leu or Met
  Variant (34)..(34): Xaa in position 34 is any amino acid
  Variant (37)..(37): Xaa in position 37 is Pro or Thr
  Variant (39)..(39): Xaa in position 39 is Thr or Val
HXXYGXXDXKXRILEFIXVXXXXGXXXGKIXXXXGPXGXGK

SEQ ID NO: 3259 - protein, 54 aa, Artificial sequence
  protein pattern
  Variant (2)..(3): Xaa in position 2 to 3 is any amino acid
  Variant (12)..(12): Xaa in position 12 is any amino acid
  Variant (14)..(14): Xaa in position 14 is Ile or Met
  Variant (15)..(16): Xaa in position 15 to 16 is any amino acid
  Variant (17)..(17): Xaa in position 17 is Ala or Ser
  Variant (18)..(18): Xaa in position 18 is Phe, Leu or Met
  Variant (19)..(19): Xaa in position 19 is Ile, Leu or Val
  Variant (23)..(26): Xaa in position 23 to 26 is any amino acid
  Variant (27)..(27): Xaa in position 27 is Ile, Leu or Val
  Variant (28)..(28): Xaa in position 28 is Asp, Lys or Arg
  Variant (29)..(29): Xaa in position 29 is any amino acid
  Variant (30)..(30): Xaa in position 30 is Asp, Asn or Thr
  Variant (31)..(31): Xaa in position 31 is Ile, Leu, Met or Val
  Variant (37)..(37): Xaa in position 37 is Ile, Leu or Val
  Variant (38)..(38): Xaa in position 38 is Ser or Thr
  Variant (39)..(39): Xaa in position 39 is Leu or Val
  Variant (40)..(40): Xaa in position 40 is any amino acid
  Variant (42)..(42): Xaa in position 42 is Lys or Arg
  Variant (43)..(43): Xaa in position 43 is Ile or Val
  Variant (44)..(44): Xaa in position 44 is Leu or Met
  Variant (45)..(45): Xaa in position 45 is any amino acid
  Variant (46)..(46): Xaa in position 46 is Ile or Val
  Variant (49)..(49): Xaa in position 49 is Ile, Leu or Val
  Variant (50)..(50): Xaa in position 50 is Lys or Arg
  Variant (53)..(53): Xaa in position 53 is Ala, Thr or Val
  Variant (54)..(54): Xaa in position 54 is Ile, Leu or Val
GXXPKDGPSAGXTXXXXXXSLAXXXXXXXXXAMTGEXXXXGXXXXXGGXXEKXX

SEQ ID NO: 3260 - protein, 28 aa, Artificial sequence
  protein pattern
  Variant (2)..(4): Xaa in position 2 to 4 is any amino acid
  Variant (5)..(6): Xaa in position 5 to 6 is any or no amino acid
  Variant (11)..(11): Xaa in position 11 is Ala or Ser
  Variant (17)..(17): Xaa in position 17 is any amino acid
  Variant (19)..(19): Xaa in position 19 is any amino acid
  Variant (21)..(21): Xaa in position 21 is Asp or Glu
  Variant (22)..(22): Xaa in position 22 is Lys or Arg
  Variant (23)..(23): Xaa in position 23 is Ile or Val
  Variant (24)..(24): Xaa in position 24 is any amino acid
  Variant (27)..(27): Xaa in position 27 is any amino acid
  Variant (28)..(28): Xaa in position 28 is Ala, Thr or Val
LXXXXXYCREXGVRNLXKXIXXXXRKXX

SEQ ID NO: 3261 - protein, 15 aa, Artificial sequence
  protein pattern
  Variant (2)..(2): Xaa in position 2 is Ala, Pro or Val
  Variant (5)..(5): Xaa in position 5 is any amino acid
  Variant (11)..(11): Xaa in position 11 is Asn or Thr
  Variant (12)..(12): Xaa in position 12 is Ala, Asn, Gln or Ser
PXGVXMGLAWXXMGG

SEQ ID NO: 3262 - protein, 38 aa, Artificial sequence
  protein pattern
  Variant (2)..(2): Xaa in position 2 is Ala, Gly or Ser
  Variant (3)..(3): Xaa in position 3 is Lys or Arg
  Variant (4)..(4): Xaa in position 4 is any amino acid
  Variant (5)..(5): Xaa in position 5 is Ile or Val
  Variant (6)..(6): Xaa in position 6 is Asp or Glu
  Variant (7)..(7): Xaa in position 7 is Ala, Asp, Glu, Asn, Ser or Thr
  Variant (9)..(10): Xaa in position 9 to 10 is any amino acid
  Variant (11)..(12): Xaa in position 11 to 12 is any or no amino acid
  Variant (14)..(15): Xaa in position 14 to 15 is any or no amino acid
  Variant (17)..(17): Xaa in position 17 is Glu, Lys or Arg
  Variant (18)..(18): Xaa in position 18 is Phe or Tyr
  Variant (19)..(19): Xaa in position 19 is any amino acid
  Variant (21)..(21): Xaa in position 21 is any amino acid
  Variant (24)..(24): Xaa in position 24 is Leu or Met
  Variant (26)..(26): Xaa in position 26 is Ala, Gly, Ser or Val
  Variant (28)..(29): Xaa in position 28 to 29 is Lys or Arg
  Variant (33)..(33): Xaa in position 33 is Ile, Leu, Met or Val
  Variant (34)..(34): Xaa in position 34 is Asp or Glu
  Variant (35)..(35): Xaa in position 35 is any amino acid
  Variant (36)..(36): Xaa in position 36 is Asp, Glu or Gly
  Variant (37)..(37): Xaa in position 37 is any amino acid
  Variant (38)..(38): Xaa in position 38 is Asp or Lys
IXXXXXXKXXXXQXXRXXXLXEQXKXIXXELGXXXXXX

SEQ ID NO: 3263 - protein, 23 aa, Artificial sequence
  protein pattern
  Variant (3)..(3): Xaa in position 3 is any amino acid
  Variant (12)..(13): Xaa in position 12 to 13 is any amino acid
  Variant (14)..(14): Xaa in position 14 is Ile or Leu
  Variant (15)..(15): Xaa in position 15 is Ala or Ser
  Variant (16)..(16): Xaa in position 16 is any amino acid
  Variant (17)..(17): Xaa in position 17 is Ser or Thr
  Variant (18)..(18): Xaa in position 18 is Phe, Ile, Leu or Val
  Variant (19)..(19): Xaa in position 19 is Ala, Cys, Gly, Ser or Thr
  Variant (20)..(20): Xaa in position 20 is Lys or Arg
  Variant (21)..(22): Xaa in position 21 to 22 is any amino acid
  Variant (23)..(23): Xaa in position 23 is Ile, Leu or Met
TGXLGDVMKESXXXXXXXXXXXX

SEQ ID NO: 3264 - protein, 29 aa, Artificial sequence
  protein pattern
  Variant (2)..(4): Xaa in position 2 to 4 is any amino acid
  Variant (7)..(7): Xaa in position 7 is Ile or Val
  Variant (8)..(8): Xaa in position 8 is Ala or Thr
  Variant (9)..(9): Xaa in position 9 is Ala, Asp or Glu
  Variant (10)..(10): Xaa in position 10 is Asp or Glu
  Variant (12)..(13): Xaa in position 12 to 13 is any amino acid
  Variant (16)..(17): Xaa in position 16 to 17 is any amino acid
  Variant (20)..(22): Xaa in position 20 to 22 is any amino acid
  Variant (23)..(23): Xaa in position 23 is Ala, Gly, Ser or Thr
  Variant (24)..(26): Xaa in position 24 to 26 is any amino acid
  Variant (27)..(27): Xaa in position 27 is Ala, Cys, Ser or Thr
  Variant (29)..(29): Xaa in position 29 is Ile, Leu or Val
IXXXGYXXXXKXXIAXXYLXXXXXXXXGX

SEQ ID NO: 3265 - protein, 27 aa, Artificial sequence
  protein pattern
  Variant (2)..(2): Xaa in position 2 is Ala, Ser or Val
  Variant (3)..(3): Xaa in position 3 is Ala, Gly or Gln
  Variant (4)..(4): Xaa in position 4 is Ala, Ile or Val
  Variant (5)..(6): Xaa in position 5 to 6 is any amino acid
  Variant (7)..(7): Xaa in position 7 is Ile, Leu or Val
  Variant (8)..(8): Xaa in position 8 is Ile or Val
  Variant (9)..(9): Xaa in position 9 is Phe or Leu
  Variant (11)..(11): Xaa in position 11 is any amino acid
  Variant (12)..(12): Xaa in position 12 is Ala, Asp, Glu or Gly
  Variant (14)..(15): Xaa in position 14 to 15 is any amino acid
  Variant (17)..(17): Xaa in position 17 is Phe, Trp or Tyr
  Variant (18)..(18): Xaa in position 18 is any amino acid
  Variant (19)..(19): Xaa in position 19 is Asp or Glu
  Variant (21)..(23): Xaa in position 21 to 23 is any amino acid
  Variant (24)..(24): Xaa in position 24 is Ile, Met or Val
  Variant (25)..(26): Xaa in position 25 to 26 is any amino acid
RXXXXXXXXPXXNXXDXXXLXXXXXXG

SEQ ID NO: 3266 - protein, 15 aa, Artificial sequence
  protein pattern
  Variant (2)..(2): Xaa in position 2 is Ala, Glu, Gln or Ser
  Variant (6)..(6): Xaa in position 6 is Ile, Met or Val
  Variant (11)..(11): Xaa in position 11 is Ile or Val
  Variant (14)..(14): Xaa in position 14 is Ile, Leu or Val
  Variant (15)..(15): Xaa in position 15 is Asp, Gly or Ser
TXNPLXLIDEXDKXX

SEQ ID NO: 3267 - protein, 25 aa, Artificial sequence
  protein pattern
  Variant (2)..(8): Xaa in position 2 to 8 is any amino acid
  Variant (11)..(12): Xaa in position 11 to 12 is any amino acid
  Variant (13)..(13): Xaa in position 13 is Ala, Ser or Thr
  Variant (15)..(15): Xaa in position 15 is any amino acid
  Variant (16)..(16): Xaa in position 16 is any or no amino acid
  Variant (18)..(18): Xaa in position 18 is any amino acid
  Variant (20)..(20): Xaa in position 20 is Glu, Lys or Arg
  Variant (21)..(22): Xaa in position 21 to 22 is any amino acid
  Variant (23)..(23): Xaa in position 23 is Glu or Asn
  Variant (24)..(24): Xaa in position 24 is Ala, Ile or Leu
  Variant (25)..(25): Xaa in position 25 is Glu, Gly, Asn, Gln, Ser or Thr
LXXXXXXXRLXXXLXXLXKXXXXXX

SEQ ID NO: 3268 - DNA, 444 bp, Saccharomyces cerevisiae
  CDS (1)..(444)
atgtcctccaatcttaccgaagaacaaattgctgaattcaaagaagcctttgccctctttgataaagataacaatggctctatctcatcaagtgaattggccactgtgatgaggtcattgggtctttcgcccagtgaagcagaagtaaatgatttgatgaacgaaatagatgttgatggtaaccatcaaatcgaatttagtgaatttttggctctgatgtctcgtcaactcaaatcaaatgactctgaacaagaactactagaagcttttaaagtattcgataagaacggtgatggtttaatctccgccgctgagttgaaacacgtgctaacatccattggtgaaaaattgactgatgccgaagtagatgatatgctaagagaggttagtgatggatcaggcgagatcaacattcaacaattcgctgctttgttatctaaatag

SEQ ID NO: 3269 - protein, 147 aa, Saccharomyces cerevisiae
MSSNLTEEQIAEFKEAFALFDKDNNGSISSSELATVMRSLGLSPSEAEVNDLMNEIDVDGNHQIEFSEFLALMSRQLKSNDSEQELLEAFKVFDKNGDGLISAAELKHVLTSIGEKLTDAEVDDMLREVSDGSGEINIQQFAALLSK

SEQ ID NO: 3270 - DNA, 727 bp, Zea mays
  CDS (1)..(501)
ctgccttcctgcctgcttccctccctccgtgagatccccgctcgggttgccatggcggaccagctcaccgacgaacagatcgccgagttcaaggaggccttcagcctcttcgacaaggacggcgacggctgcatcaccaccaaggaacttggcactgtgatgcgctcattggggcagaaccctactgaggctgagcttcaggacatgatcaatgaggttgatgctgatggcaatggaaccatcgactttcctgagtttctcaacctgatggcgcgcaagatgaaggacaccgactccgaggaggagctcaaggaggccttccgtgtgttcgacaaggaccagaacggcttcatctccgctgctgagcttcgccatgtcatgaccaacctaggcgagaagctgacggacgaggaggtggacgagatgatccgtgaagccgatgtggacggtgatggccagatcaactacgatgagttcgtgaaggtgatgatggccaagtgagatatgcccgccgtttttaagctagttcctctcctgatggtagtaactagtctagttttggagactgactgcttttggttgtgtcttacgcctatccttgcgtcaatggacatatccgtttgttttcaaccaagggattttaccatgtcggtaatttcgttcaaatttggttcttgttgtattacatttgtgttatcttggtacaatgataatgtctttctctttc

SEQ ID NO: 3271 - protein, 166 aa, Zea mays
LPSCLLPSLREIPARVAMADQLTDEQIAEFKEAFSLFDKDGDGCITTKELGTVMRSLGQNPTEAELQDMINEVDADGNGTIDFPEFLNLMARKMKDTDSEEELKEAFRVFDKDQNGFISAAELRHVMTNLGEKLTDEEVDEMIREADVDGDGQINYDEFVKVMMAK

SEQ ID NO: 3272 - DNA, 479 bp, Glycine max
  CDS (34)..(477)
  misc_feature (348)..(348): n is a, g, c or t
aagaagagaaggggaaaaggaaaaaaaggcaaaatgggtaaggatctgagcgatgagcaagtgtcttcaatgaaggaagctttctctttattcgacacagacggtgacggtcggatcgcgccgtcggagctggggatcctgatgaggtctctgggagggaacccgactcaggcccaactcaaagccatcgtggccgaagagaacctcacggctcccttcgacttcccccgattcctcgatcttatggccaaacacatgaaacccgaacccttcgatcgccaactccgcgacgccttcaaggtcctcgacaaggactccaccggcttcgtcgccgtctccgagctccgncacatcctcaccaacatcggcgagaagctcgagccctccgagttcgacgagtggatccgtgaagtcgacgtcggttccgacggcaagatccgctacgaggatttcatctccagaatggtcgccaagtaacg

SEQ ID NO: 3273 - protein, 147 aa, Glycine max
MGKDLSDEQVSSMKEAFSLFDTDGDGRIAPSELGILMRSLGGNPTQAQLKAIVAEENLTAPFDFPRFLDLMAKHMKPEPFDRQLRDAFKVLDKDSTGFVAVSELRHILTNIGEKLEPSEFDEWIREVDVGSDGKIRYEDFISRMVAK

SEQ ID NO: 3274 - DNA, 718 bp, Glycine max
  CDS (17)..(460)
gagaaggaaagggaaaatgggtaaggatctgagcgaggaacaagtgtcttccatgaaggaagccttctctctattcgacactgacggagacggtcggatcgctccgtcggagctggggatcctgatgaggtctctgggaggtaacccgacgcaggcccaactcaaagccatcgtggctgaagagaacctcacggcccccttcgacttcccccgattcctcgatctaatggccaaacacattaaacccgaacccttcgatcgccaactccgcgacgccttcaaggtcctcgacaaggactccaccggcttcgtcgccgtctccgagctccgccacatcctcaccaacatcggcgagaagctcgagccctccgagttcgacgagtggatccgtgaagtcgacgtcggatccgacggcaagatccgctacgaggatttcatcgccagaatggtcgccaagtaacgccgattccattctctctttccagtgttattttctctctttctttcgcttttggttgtttgcttttcagtggaccaattaatagattaatcaattgtcttgtgtttactttttattttatggtgtgtggctaaccgagggtggttttaggaaacggtggctagctactcaatttgccctatttgctttgggttttatttgtattattatgagatctgattctgagctagtctatatatgcatgctgtaattcagacc

SEQ ID NO: 3275 - protein, 147 aa, Glycine max
MGKDLSEEQVSSMKEAFSLFDTDGDGRIAPSELGILMRSLGGNPTQAQLKAIVAEENLTAPFDFPRFLDLMAKHIKPEPFDRQLRDAFKVLDKDSTGFVAVSELRHILTNIGEKLEPSEFDEWIREVDVGSDGKIRYEDFIARMVAK

SEQ ID NO: 3276 - DNA, 474 bp, Glycine max
  CDS (1)..(474)
atggcggtgaatcaactcaatcaattaagggaaatttttgcaaaatttgacatggattcggatggcagcctaacgattttggaactcgccgcgctccttcgatcgttggggctgaatccctcaggggacgaaatccatgccttgttagccaacatggactcaaatggcaatggctttgtggagtttgatgagttggtggaagcaatattgcatgacataagtgcagagattttgttgaaccaagaaatgctatttggggtgttcaagtgttttgaccgtgatgggaacggttacataacagctgcggagttagcaggggcaatggcaaaaatgggtcaaccccttacatatagagagctcacagagatgatcacagaggctgacacagatggtgatggtgtgattagtttcaatgaatttgcctctgtgatgggtaggtcagcctctgacttcttaggccttgcattgttgtga

SEQ ID NO: 3277 - protein, 157 aa, Glycine max
MAVNQLNQLREIFAKFDMDSDGSLTILELAALLRSLGLNPSGDEIHALLANMDSNGNGFVEFDELVEAILHDISAEILLNQEMLFGVFKCFDRDGNGYITAAELAGAMAKMGQPLTYRELTEMITEADTDGDGVISFNEFASVMGRSASDFLGLALL

SEQ ID NO: 3278 - DNA, 486 bp, Glycine max
  CDS (1)..(486)
atgtcatcaaagcttcaagttcagcagcttaatcagttaagggagattttcggtcgatttgacatggactcagatggaagcctaacaatgctagagctagcagcacttcttaggtctctggggctgaagccctcgggtgaccaagtccaagcactgttagccaacatggactcaaacgccaatggcaaagtggagtttgatgaattgataagagccatattacctgacataaatgcacaggttttgctgaaccaagaacagctcctaggggtgttcaagtgcttcgatcgcgacggcaacggttacatatcggccgcagagttggccggggcaatggccaaaatgggccagccactcacgtaccgagagctcacggagatgatcaaagaggctgacacggatggggatggtgttattagcttcactgagtttgccactatcatggctcgctctgcttctgattttctaggcctctcgttctgctga

SEQ ID NO: 3279 - protein, 161 aa, Glycine max
MSSKLQVQQLNQLREIFGRFDMDSDGSLTMLELAALLRSLGLKPSGDQVQALLANMDSNANGKVEFDELIRAILPDINAQVLLNQEQLLGVFKCFDRDGNGYISAAELAGAMAKMGQPLTYRELTEMIKEADTDGDGVISFTEFATIMARSASDFLGLSFC

SEQ ID NO: 3280 - DNA, 450 bp, Glycine max
  CDS (1)..(450)
atggcaaatgcatggacagaagatcaaatagctatattccatgaagcgtttgacgttgttgacaaggactccgacggtttcatttcggtggacgaactcttatccattgtgcgatcattagaaggaaactcaacaaaagaagaaattcgagaaatgattagtgaagttgacattgatggaaatggccggagtgtaaattttgaaaacttcttgaaaattatgggaaggacaatgaaggaaaatcagactgaggagctaaaagactcgttcaaagtattcgacagggataatgatggatatatatcagcaactgagctgagacaagtaatggtgaaattgggagagaggctaacagacgaagaagttgaacaaatgattagagaagctgatttggatggagatggtcgagttagctatgaagaatttgtgaggtttatgacgttaaattga

SEQ ID NO: 3281 - protein, 149 aa, Glycine max
MANAWTEDQIAIFHEAFDVVDKDSDGFISVDELLSIVRSLEGNSTKEEIREMISEVDIDGNGRSVNFENFLKIMGRTMKENQTEELKDSFKVFDRDNDGYISATELRQVMVKLGERLTDEEVEQMIREADLDGDGRVSYEEFVRFMTLN

SEQ ID NO: 3282 - DNA, 777 bp, Glycine max
  CDS (152)..(583)
  misc_feature (767)..(767): n is a, g, c or t
attctccaattctccttctccttccaagttaatcatgggtttcaaatccctttttaacatgaagaagaagaaacttctgaagacgatgtcgtcttcgtcctcattgccccacgcgccaccggtatcgttgcattcatcacgcgcctccgtgatggaggaccttgaatatgtcttcaaaaagttcgacgcaaacggcgacggaaaaatctccgcttcggaactcggctccatgatgaagagcctgggccagcccgcgaccgaagaagagctaaagaaactgattcgagaggtcgattccgacggcgacggtcacatcaacttggaagagtttactgagttgaataccaaggacgtggaccccgacgaggttttggagaatctgaaggacgctttctccatctttgatcttgacggtaatggttccattaccgcggaggagcttaaaatggtgatggcgagcctcggagacgcgtgttccatcgaggagtgccggaagatgatcgccggcgtcgacggcaacggcgacggcatgatcaacttcgacgagtttcaaataatgatgaccggaaacatgaacaaataaataactacgtcaaaagtggatttgcatattatttctggatccgatttccgtgatgatgatatgagattttctctctgcatggttgttcacactgctatgaggttatttcgtcttttttcttttctttttgagaattctgcgtaaatggggtagtatcttaatttttaaagattaaccaccaacnatatagctgt

SEQ ID NO: 3283 - protein, 143 aa, Glycine max
MEDLEYVFKKFDANGDGKISASELGSMMKSLGQPATEEELKKLIREVDSDGDGHINLEEFTELNTKDVDPDEVLENLKDAFSIFDLDGNGSITAEELKMVMASLGDACSIEECRKMIAGVDGNGDGMINFDEFQIMMTGNMNK

SEQ ID NO: 3284 - DNA, 483 bp, Glycine max
  CDS (1)..(483)
atgtccatgctcgaaaccgaccaaatcaagcaactgaacgacatattcaagcgcttcgacatggaccaggacggcagcctgacccacctggagctggcggcgctcctccggtccctgggcatcaaacccaccggcgacgaaatctacgccctcctctctaacatggacgaaaacggcaacggctacatcgagttcgacgagctcgtgcatgccatcatgcctgacctcaccgagagcgtcctcatcaaccaggagcagctcctcgaggtcttccggtctttcgaccgtgatggcaacggctacatcacagccagcgagctcgcgggttccatggcgaagatgggccagccactcacctaccgcgagctcgcctccatgatggctgaggccgatagcaacggcgacggcgtcattagcttcaacgagttcgccgccctcatggccaaatccgccgctgaatttctcggcgtcaaggtcgcctag

SEQ ID NO: 3285 - protein, 160 aa, Glycine max
MSMLETDQIKQLNDIFKRFDMDQDGSLTHLELAALLRSLGIKPTGDEIYALLSNMDENGNGYIEFDELVHAIMPDLTESVLINQEQLLEVFRSFDRDGNGYITASELAGSMAKMGQPLTYRELASMMAEADSNGDGVISFNEFAALMAKSAAEFLGVKVA

SEQ ID NO: 3286 - DNA, 447 bp, Glycine max
  CDS (1)..(447)
atggcaggagcactgacagatgatcagattgctgaattccatgaagccttttgcctcattgacaaggactctgatggattcattactgtggatgaattggcaaccattatccgatcattagaagggaatccaacgaaagaagaaatccaagacatgattagtgaggtcgatattgatgggaatgggagtatagattttgaagagttcttgaatattatgggaagaaaaatgaaggaaactctagctgaagagctgagagaagcattcaaagtatttgacagagatcaaaatggatacatatccgccactgagctgaggcacgtaatgatgaatttgggagagaggctgacagatgaagaggcagaacaaatgattagagaggcagatttggatggggatggtcaagttagctttgaagaattttcaaggattatgatgctcaaatga

SEQ ID NO: 3287 - protein, 148 aa, Glycine max
MAGALTDDQIAEFHEAFCLIDKDSDGFITVDELATIIRSLEGNPTKEEIQDMISEVDIDGNGSIDFEEFLNIMGRKMKETLAEELREAFKVFDRDQNGYISATELRHVMMNLGERLTDEEAEQMIREADLDGDGQVSFEEFSRIMMLK

SEQ ID NO: 3288 - DNA, 450 bp, Glycine max
  CDS (1)..(450)
atgaaggaggtgctgagtgaagatttgattgttgagtttctagaagccttctgtctttttgacagagatggagacggctgcataaccatggaggaattagctagtgcacttagaacactgaatcaaaataatcctaggaaggaagagttgcaaatcatgatgaatgaagtggatatgaatggcagtggaaccatagaatttgggcagttcttgaatctcatggccagaaaaatgaagcaaagtgaagcagaagaggaattaaaagaagctttcaaactgtttgacaaggatcaagatggttacatatcacccactgagttgttatctgcgatgagaaatattggagtgaagatcacagaagaagagctggagcatatgatcagactggctgatttggacggtgatggacgagttaattatgaagagttcatgaggatgatgacggtttaa

SEQ ID NO: 3289 - protein, 149 aa, Glycine max
MKEVLSEDLIVEFLEAFCLFDRDGDGCITMEELASALRTLNQNNPRKEELQIMMNEVDMNGSGTIEFGQFLNLMARKMKQSEAEEELKEAFKLFDKDQDGYISPTELLSAMRNIGVKITEEELEHMIRLADLDGDGRVNYEEFMRMMTV

SEQ ID NO: 3290 - DNA, 854 bp, Glycine max
  CDS (184)..(675)
aaaaaattgtgtcgtgtatatagtagtattttatttataagagctaccccttggaacattcaaaacagatcctacatttgggcaaaaaggaagctcaaccacatccaatacctcagaccacacaacagtgtagaagggagatttgaaagtgcatgtgaagaaacgcattagaagagaaaaaagatgagcaaaaaacagacggtgaaattagacgaggagcaaatcgcagaattgcgcgaaatctttcggtccttcgatcggaacaatgacgggagcctgacgcagttggagctgagttcgcttctgcgctcgcttggtctgaagcccagtgcagaccaactcgagggatttattcagagggcggacaccaacagcaatggcctggtggagttctcggagttcgttgctctggtcgcgccggagcttctgccggccaagtcgccctacacggaagagcagctgaagcagctgttccgaatgttcgatcgtgacgggaacggcctcatcactgcggcggagttggctcactccatggctaggcttggccatgccctcaccgccgaggagctgaccgggatgatcaaagaggccgacaccgacggcgatggcatgatcaactatcaggagttcgctcatgctattacttccgctgcttttgataattgctggccttaaccactctctttctaggtaataatgtaaattcaattttttcgggagaaattacgagattagcgatccatttaataagggagaaactttttattcttatttcaagaatttgagtttatattttgctatattttgatgtacaacgatgataataaagagcaaatctaagtgcttatacatct

SEQ ID NO: 3291 - protein, 163 aa, Glycine max
MSKKQTVKLDEEQIAELREIFRSFDRNNDGSLTQLELSSLLRSLGLKPSADQLEGFIQRADTNSNGLVEFSEFVALVAPELLPAKSPYTEEQLKQLFRMFDRDGNGLITAAELAHSMARLGHALTAEELTGMIKEADTDGDGMINYQEFAHAITSAAFDNCWP

SEQ ID NO: 3292 - DNA, 453 bp, Glycine max
  CDS (1)..(453)
atggatcctatggagcttaagcgtgttttccaaatgttcgaccgaaacggtgacgggagaatctcattgaaggagttgagtgattcattggagaatctgggcatcttgatcccggacaaggaccttgctcagatgatcgagaggattgacgtgaacggagacggttgcgtggacatggatgagtttggggacttatacgagtccatcatggaggagcgtgacgaggaggaggacatgagggaggccttcaacgtcttcgatcagaaccgcgacggtttcatctccgtcgaggaactgcgaagggtgttggcctccctcggactcaaacaaggggggacccttgacgagtgcaagaagatgatcaccaaagtcgatgttgatggggatggcatggttaattacaaagagttcaggcaaatgatgaaggggggaggctttactgctcttagttag

SEQ ID NO: 3293 - protein, 150 aa, Glycine max
MDPMELKRVFQMFDRNGDGRISLKELSDSLENLGILIPDKDLAQMIERIDVNGDGCVDMDEFGDLYESIMEERDEEEDMREAFNVFDQNRDGFISVEELRRVLASLGLKQGGTLDECKKMITKVDVDGDGMVNYKEFRQMMKGGGFTALS

SEQ ID NO: 3294 - DNA, 459 bp, Glycine max
  CDS (1)..(459)
atgtgcggccccataacagaggacctcgaatatgtattcaagaagttcgatgcaaacggcgacggcaaaatctcctcttcggaactaggctccatcatgaagagccttggccaacccgccaccgaagaagaggtcaagaggatgattcaagaggttgacgccaacggtgacggccacatcaacttaggtgagttcttggaattgaacaccaagggcgtggaccccgacgaggttttggagaatctgaaggacgctttttccatcttcgacgtcgacggtaatgggttgattaccgcccaagaacttaacatggtcatggcgagccttggagatgcctgttccattgacgagtgccagaagatgatcgccggcgtcgacggcaacggagacggcatgatcaatttcgaagagtttcagttgatgatgaccggaaacggaaacgggaacatgaacaaataa

SEQ ID NO: 3295 - protein, 152 aa, Glycine max
MCGPITEDLEYVFKKFDANGDGKISSSELGSIMKSLGQPATEEEVKRMIQEVDANGDGHINLGEFLELNTKGVDPDEVLENLKDAFSIFDVDGNGLITAQELNMVMASLGDACSIDECQKMIAGVDGNGDGMINFEEFQLMMTGNGNGNMNK

SEQ ID NO: 3296 - DNA, 480 bp, Glycine max
  CDS (1)..(480)
atgagcaaaaagcagatggtgaaattggacgaggagcaaatcgcagaattgcgagaaatctttcggtcgttcgatcggaacaacgacgggagcctgacgcagttggagctgagttcgcttctgcggtcgcttggtctgaagccgagtgcggagcaactggagggctttattcagagggcggacaccaacaacaacgggatggtggagttctcggagttcgtcgcgctggtggcgccggatcttctgccggccaagtcgcactacactgaagaccagttgaggcatctgttccgaatgttcgaccgggacgggaacggcctcatcactgcggcggagttggctcactccatggccaggcttggccacgccctcaccgtcgaggagctgaccgggatgatcaaagaggctgataccgacggcgatggcatgatcaactttcaggagttcgctcatgctattacttccgctgcttggccttaa

SEQ ID NO: 3297 - protein, 159 aa, Glycine max
MSKKQMVKLDEEQIAELREIFRSFDRNNDGSLTQLELSSLLRSLGLKPSAEQLEGFIQRADTNNNGMVEFSEFVALVAPDLLPAKSHYTEDQLRHLFRMFDRDGNGLITAAELAHSMARLGHALTVEELTGMIKEADTDGDGMINFQEFAHAITSAAWP

SEQ ID NO: 3298 - DNA, 417 bp, Glycine max
  CDS (1)..(417)
atggcaaatgcatggacagaagatcaaatagctatattccatgaagcctttgtcgttgttgacaaggactccgacggtttcattacgaaggaaacgcaacaaaagaaaaaattcaagaaaatgattagtgaagtcgacattaatggaaatagcctgagtgtaaattttgaagacttcttgaaaattatgggaaggacaataaaggaaaatctgactgaggagctaaaagactcgttcaaagtatttgacagggataatgatggatatatatcagcaactgagctgagacaagtaatggtgaaattgggagagaggctaacagacgaagaagttgaacaaatgattagagaagcagatttggatggagatggtcgagatagctatgaagaatttctgaggtttatgacgttaaattga

SEQ ID NO: 3299 - protein, 138 aa, Glycine max
MANAWTEDQIAIFHEAFVVVDKDSDGFITKETQQKKKFKKMISEVDINGNSLSVNFEDFLKIMGRTIKENLTEELKDSFKVFDRDNDGYISATELRQVMVKLGERLTDEEVEQMIREADLDGDGRDSYEEFLRFMTLN

SEQ ID NO: 3300 - DNA, 453 bp, Glycine max
  CDS (1)..(453)
atggaccctgcagagctgaagcgcgttttccaattgttcgaccgcaacggtgacgggagaatctcattgaaggagctgagcgattcgttggagaatctaggcatcttgatcccggacaaggaccttgctcagatgatcgagagaatcgacatgaacggagacggttgcatagacgtggacgagtttggggacttgtatgagtccatcatggaggagcctgatgaggaggaggacatgagggaggcctttaacgtctttgaccagaaccgcgacggtttcatcaccgtcgaggaactagggacagtgctggcctccctcggcctcaaacaagggaggacccttgacgagtgcaagaagatgatcatgaaagtcgacgttgatggagatggcatggttaattacaaggagttcaggcaaatgatgaagggaggaggcttcactgtccttagttag

SEQ ID NO: 3301 - protein, 150 aa, Glycine max
MDPAELKRVFQLFDRNGDGRISLKELSDSLENLGILIPDKDLAQMIERIDMNGDGCIDVDEFGDLYESIMEEPDEEEDMREAFNVFDQNRDGFITVEELGTVLASLGLKQGRTLDECKKMIMKVDVDGDGMVNYKEFRQMMKGGGFTVLS

SEQ ID NO: 3302 - DNA, 453 bp, Glycine max
  CDS (1)..(453)
atggcagatatcctgagtgaagaacagattgttgattttaaagaggcctttggcttgtttgacaaagatggagatggttgcattactgtggaagaacttgccactgtcattcggtcattggatcagaaccccactgaagaagagctccaagatatgataagcgaagtcgatgcagatggcaatggaaccattgaatttgacgagttcttgagcttgatggccaagaaagtcaaagacactgatgcagaggaggagctcaaagaagctttcaaggtttttgacaaagatcaaaatggctacatatcagctagtgagttgagacacgtaatgatcaatctaggggaaaaactaaccgatgaagaggtggagcagatgattaaagaagcagatttggacggtgatggccaagttaactatgaggaattcgtcaagatgatgatgaccgttcgatga

SEQ ID NO: 3303 - protein, 150 aa, Glycine max
MADILSEEQIVDFKEAFGLFDKDGDGCITVEELATVIRSLDQNPTEEELQDMISEVDADGNGTIEFDEFLSLMAKKVKDTDAEEELKEAFKVFDKDQNGYISASELRHVMINLGEKLTDEEVEQMIKEADLDGDGQVNYEEFVKMMMTVR

SEQ ID NO: 3304 - DNA, 447 bp, Glycine max
  CDS (1)..(447)
atggcaggaggactgacagatgatcagattgctgaattccatgaagcctttagcctcattgacaaggattctgatggattcattactgtggatgaattgacaaccattatccgatcattagaagggaatccaacgaaagaagaaatccaaaacatgattagtgaggtcgatattgatgggaatgggagtatagattttgaagagttcttgaatattatgggaagaaaaatgaaggaaactttagctgaagagctgaaagaagcattcaaagtatttgatagagatcaaaatggatacatatccgccactgagctgaggcacgtaatgacgaatttgggagagaggctgacaggtgaagaggcagaacaaatgattatggaggcagatttggatggggatggtcaagttagttttgaagaatttgcaaggattatgatgctcaaatga

SEQ ID NO: 3305 - protein, 148 aa, Glycine max
MAGGLTDDQIAEFHEAFSLIDKDSDGFITVDELTTIIRSLEGNPTKEEIQNMISEVDIDGNGSIDFEEFLNIMGRKMKETLAEELKEAFKVFDRDQNGYISATELRHVMTNLGERLTGEEAEQMIMEADLDGDGQVSFEEFARIMMLK

SEQ ID NO: 3306 - DNA, 868 bp, Glycine max
  CDS (89)..(541)
  misc_feature (850)..(850): n is a, g, c or t
ggtttaattctctctccctctctctctctctctctctctctctcttttctgagtcacaaaatattgtttttgtacaaacattaacaccatggcagatgtcctgagtgaagaacagattggtgagatcaaagaagcctttggcttgtttgacaaagatggagatgggtgcattactgtggaagaattggccactgttattcggtcattggatcagaaccccacagaagaagagctccaagacatgataaacgaggtcgatacagatggcaatggaaccattgaatttgttgagtttttgaacttaatggccaagaaaatgaaggaaactgatgcagaggaagatctcaaagaggctttcaaggtgtttgacaaggatcaaaatggctacatttcagcaagtgagttgaggcacgttatgatcaatctgggtgaaaaactaactgatgaagaggtggagcagatgattaaagaagctgatttggatggtgatggtcaagttggctatgatgaatttgtcaagatgatgatgattattggatgaaaatttaaaccaacaaatttattgttcgaattcgtttttgtgccccactctcatttactcccaagaaattaataagtcttccaattaatgtttgttgtatttaacttgtacacatgatgtgaatgaccaatgtattagagtgacatctcagccacccatttcatgttcaaacttcaacccataattattctttcagttttagtttagtattccttatgttttacaattaattagagtaaatttattcaagaaccgttgaaattaaaaaaaaaaaaaaaaaaaaaattaaataaaaaataaaaaaggtcnggggcggacggggcggcc

SEQ ID NO: 3307 - protein, 150 aa, Glycine max
MADVLSEEQIGEIKEAFGLFDKDGDGCITVEELATVIRSLDQNPTEEELQDMINEVDTDGNGTIEFVEFLNLMAKKMKETDAEEDLKEAFKVFDKDQNGYISASELRHVMINLGEKLTDEEVEQMIKEADLDGDGQVGYDEFVKMMMIIG

SEQ ID NO: 3308 - DNA, 450 bp, Glycine max
  CDS (1)..(450)
atggcagatcaactcaccgatgaacagatctcggagttcaaggaagccttcagtttgttcgataaggatggcgatggttgcatcacaacaaaggagcttgggactgttatgcgttcgttgggtcagaatccaacagaggctgagctccaagacatgatcaatgaagtagatgctgatgggaatggcaccattgacttccctgagttcttgaacctcatggctagaaagatgaaggacactgattctgaggaggagctgaaagaggcgttccgagtgtttgacaaggaccagaatgggttcatttctgctgctgagctccgccatgtgatgaccaaccttggggagaagctcactgatgaagaggttgatgagatgattcgagaggctgatgtcgatggcgacggccaaataaactacgaggagtttgttaaggtcatgatggccaagtga

SEQ ID NO: 3309 - protein, 149 aa, Glycine max
MADQLTDEQISEFKEAFSLFDKDGDGCITTKELGTVMRSLGQNPTEAELQDMINEVDADGNGTIDFPEFLNLMARKMKDTDSEEELKEAFRVFDKDQNGFISAAELRHVMTNLGEKLTDEEVDEMIREADVDGDGQINYEEFVKVMMAK

SEQ ID NO: 3310 - DNA, 462 bp, Apis mellifera (honey bee)
  CDS (1)..(462)
atggatgatctgaccaaggatcaaattgctcttttgaagaaagcgttcgacgccttcgatcatgacaaaaagggtagcatcggtaccgacatggtgggcacgatattgaccatgttgggttacgagctcagcgagaagacgttgaaagagatcatcactgaagttgatgaagatggatccggccaattagaattcgaagagttctgcaccctggccgcccgattcttagtggaggaagattcggaggctatgcagcaggaattacgcgaggcattccgattgtacgacaaggaagggaacggctacataaccactgcagtattccgcgacattcttcacgaattggacgacaaattgacgccgcaagagttggacatgatgatagaggaaattgatgccgacggttctggaacgctcgacttcgacgaatttatggaagttatgaccggtggtgacgattaa

SEQ ID NO: 3311 - protein, 153 aa, Apis mellifera (honey bee)
MDDLTKDQIALLKKAFDAFDHDKKGSIGTDMVGTILTMLGYELSEKTLKEIITEVDEDGSGQLEFEEFCTLAARFLVEEDSEAMQQELREAFRLYDKEGNGYITTAVFRDILHELDDKLTPQELDMMIEEIDADGSGTLDFDEFMEVMTGGDD

SEQ ID NO: 3312 - DNA, 450 bp, Zea mays
  CDS (1)..(450)
atggcggaccagctcacggacgagcagatcgcggagttcaaggaggccttcagcctcttcgataaggatggcgacggctgcatcactaccaaggagcttggaactgtgatgcgctcccttggccagaaccccactgaagcagagctgcaggacatgatcaacgaggttgatgctgatggcaatgggaccattgacttcccagagttcctgaacctgatggcaaggaagatgaaggacaccgactccgaggaggagcttaaggaggcctttcgcgtcttcgacaagggccagaatggtttcatctcggctgctgagctccgccatgtcatgaccaacctcggcgagaagctgactgacgaggaggtcgacgagatgatccgtgaggccgatgttgacggcgacggccagatcaactacgaggagttcgtcaaggtcatgatggccaagtga

SEQ ID NO: 3313 - protein, 149 aa, Zea mays
MADQLTDEQIAEFKEAFSLFDKDGDGCITTKELGTVMRSLGQNPTEAELQDMINEVDADGNGTIDFPEFLNLMARKMKDTDSEEELKEAFRVFDKGQNGFISAAELRHVMTNLGEKLTDEEVDEMIREADVDGDGQINYEEFVKVMMAK

SEQ ID NO: 3314 - DNA, 450 bp, Zea mays
  CDS (1)..(450)
atggcggaccagctcaccgacgaccagaccgccgagttcaaggaggccttcagcctcttcgacaaggacggcgacggttgcatcacaaccaaggagctcggaactgtcatgcgatcactgggtcagaacccaaccgaggctgagctccaggacatgatcaacgaggtcgatgcggacggcaacggcaccatcgacttcccggagttcctcaacctcatggcccgcaagatgaaggacaccgactccgaggaggagctcaaggaggcgttcagggtgttcgacaaggaccagaacggcttcatctctgcggcggacgtccgccacgtgatgaccaacctcggcgagaagctgaccgacgaggaggtcgatgagatgatccgcgaggccgatgtcgatggtgatggccagatcaactacgaggagttcgtcaaggtcatgatggccaagtga

SEQ ID NO: 3315 - protein, 149 aa, Zea mays
MADQLTDDQTAEFKEAFSLFDKDGDGCITTKELGTVMRSLGQNPTEAELQDMINEVDADGNGTIDFPEFLNLMARKMKDTDSEEELKEAFRVFDKDQNGFISAADVRHVMTNLGEKLTDEEVDEMIREADVDGDGQINYEEFVKVMMAK

SEQ ID NO: 3316 - DNA, 450 bp, Zea mays
  CDS (1)..(450)
atggcggaccagctcaccgacgaacagatcgccgagttcaaggaggccttcagcctcttcgacaaggacggcgacggctgcatcaccaccaaggaacttggcactgtgatgcgctcattggggcagaaccctactgaggctgagcttcaggacatgatcaatgaggttgatgctgatggcaatggaaccatcgactttcctgagtttctcaacctgatggcacgcaagatgaaggacaccgactctgaggaggagctcaaggaggccttccgtgtgttcgacaaggaccagaacggcttcatctccgctgctgagcttcgccatgtcatgaccaacctaggcgagaagctgacggacgaggaggtggacgagatgatccgtgaagccgacgtggacggtgatggccagatcaactacgacgagttcgtgaaggtgatgatggccaagtga

SEQ ID NO: 3317 - protein, 149 aa, Zea mays
MADQLTDEQIAEFKEAFSLFDKDGDGCITTKELGTVMRSLGQNPTEAELQDMINEVDADGNGTIDFPEFLNLMARKMKDTDSEEELKEAFRVFDKDQNGFISAAELRHVMTNLGEKLTDEEVDEMIREADVDGDGQINYDEFVKVMMAK

SEQ ID NO: 3318 - DNA, 447 bp, Drosophila melanogaster (fruit fly)
  CDS (1)..(447)
atggatgaattgtctgttgaagagcaggacctgctcaagaatatctatagcttattggataaggataacgaaggtgccatcacctcgaaggaattgggaatggtaatccgagcattaggtcgacagcccaatgaatcggaggttcagtccatgataaacgaggtggactctgatggaaacggatccattgcaaaggaggagttttgcaatgtgattctgcgcaagatgcacgacacaaataaggaggaggagctgcgcgatgcgtttcgcgtttttgataaggaaaacaatgggtacatctccactaccgagctgagggctgtctttatggcacttggtgaaaaattggaagacgacgagctggaggagatgatacgcgagtacgatttagatcaggataatcacatcaatttcgaggagttcaccaacatgatgaccacgcgttaa

SEQ ID NO: 3319 - protein, 148 aa, Drosophila melanogaster (fruit fly)
MDELSVEEQDLLKNIYSLLDKDNEGAITSKELGMVIRALGRQPNESEVQSMINEVDSDGNGSIAKEEFCNVILRKMHDTNKEEELRDAFRVFDKENNGYISTTELRAVFMALGEKLEDDELEEMIREYDLDQDNHINFEEFTNMMTTR

SEQ ID NO: 3320 - DNA, 546 bp, Arabidopsis thaliana (thale cress)
  CDS (1)..(546)
atggcagatcagctcaccgatgatcagatctctgagttcaaggaagcttttagccttttcgacaaagacggagatggttgcatcacaacgaaagagctaggaacagtgatgagatcattaggtcaaaatccaacagaagcagagttacaagatatgataaacgaagtagatgctgatggtaacggaaccatagacttccctgagtttctgaacctaatggctaggaagatgaaggacactgactctgaagaagagctcaaagaagctttcagggttttcgataaggaccagaacggtttcatctcggcagctgagttaagacatgtaatgacaaatcttggtgagaagttaactgatgaagaagttgatgagatgatcaaagaagctgatgttgatggagatggtcagatcaattatgaagagtttgtcaaagttatgatggcaaagagaagagggaagagagttatggcagcaaagcgtagtagcaattctgctgaatacaaagaaaagaatggtcgccggaaaagtcactgccgtattctctga

SEQ ID NO: 3321 - protein, 181 aa, Arabidopsis thaliana (thale cress)
MADQLTDDQISEFKEAFSLFDKDGDGCITTKELGTVMRSLGQNPTEAELQDMINEVDADGNGTIDFPEFLNLMARKMKDTDSEEELKEAFRVFDKDQNGFISAAELRHVMTNLGEKLTDEEVDEMIKEADVDGDGQINYEEFVKVMMAKRRGKRVMAAKRSSNSAEYKEKNGRRKSHCRIL

SEQ ID NO: 3322 - DNA, 450 bp, Strongylocentrotus purpuratus
  CDS (1)..(450)
atggctgatcaactcactgaggagcaaattgcagaattcaaggaggctttctccctttttgacaaggacggtgatggcaccatcacaactaaggagttgggtactgtgatgagatcacttggtcagaaccctactgaggctgagcttcaagacatgatcaatgaagtggatgctgatggaaatggaacgatagatttcccagaattcctcacaatgatggcaaggaaaatgaaggaaacggacagcgaagaggaaatcagggaggcattccgggtatttgacaaggatggcaatggcttcatcagtgctgcagaactgcgccacgtgatgacaaatcttggagaaaagctgacagacgaagaggtcgatgaaatgattagggaagcagatattgatggtgatggtcaagtcaattatgaagaatttgtagccatgatgacttcaaagtga

SEQ ID NO: 3323 - protein, 149 aa, Strongylocentrotus purpuratus
MADQLTEEQIAEFKEAFSLFDKDGDGTITTKELGTVMRSLGQNPTEAELQDMINEVDADGNGTIDFPEFLTMMARKMKETDSEEEIREAFRVFDKDGNGFISAAELRHVMTNLGEKLTDEEVDEMIREADIDGDGQVNYEEFVAMMTSK

SEQ ID NO: 3324 - DNA, 408 bp, Strongylocentrotus purpuratus
  CDS (1)..(408)
atgaggatacctacagaatacaaagaggcgtttgccatctttgacaagaacggagacggtatcattacgacgaaagaactgggtgaagtgatgacgtcatttggggaatcccccaatgagggggagctccgagatatggtgaacgagatcgatgttgacggaaatggtgagatcgattttgctgacttcctgtcactcatggctcgaccaatcaccgatgcgaacacggaacaagaaatcaaagaagcgtttagagaattcgataaagacggcgacggattcataagtgtaacagagttccgttatgcgatgtcgacgatcgcggataccctcaccgaggaggagcttgaggagatgatcgaggaggccgacgctcacggcgacggtcaaatcaactacgaaggttag

SEQ ID NO: 3325 - protein, 135 aa, Strongylocentrotus purpuratus
MRIPTEYKEAFAIFDKNGDGIITTKELGEVMTSFGESPNEGELRDMVNEIDVDGNGEIDFADFLSLMARPITDANTEQEIKEAFREFDKDGDGFISVTEFRYAMSTIADTLTEEELEEMIEEADAHGDGQINYEG

SEQ ID NO: 3326 - DNA, 456 bp, Strongylocentrotus purpuratus
  CDS (1)..(456)
atgacgaagccaacagagagccaattgaaagagtttaaggaggcgtttggtctttacgatagggataacgatggcttcatcacaacagatatactgggagaggtcatgaggtcattggggtcatgcccgacggaagcggaagtggaggagtctatcaacatggaggacccacatggtaaaggtaaactagacttcaacgtgttttctcggataatggcacatcacatcagtcagtcacaggtggatcctgaagaattccgagatgccttcagagtttttgataaagatgacacgggaacacttagcgcagcggagttacgtcacgtgatgacaagccttggtgagaagttaacggatactgaagtagatgagatgatacgagaggcggatgtaggcagtgacggcaggataaattatgaagaattcgttcaaatgatagctcagacacaacagtga

SEQ ID NO: 3327 - protein, 151 aa, Strongylocentrotus purpuratus
MTKPTESQLKEFKEAFGLYDRDNDGFITTDILGEVMRSLGSCPTEAEVEESINMEDPHGKGKLDFNVFSRIMAHHISQSQVDPEEFRDAFRVFDKDDTGTLSAAELRHVMTSLGEKLTDTEVDEMIREADVGSDGRINYEEFVQMIAQTQQ

SEQ ID NO: 3328 - DNA, 456 bp, Strongylocentrotus purpuratus
  CDS (1)..(456)
atggcatgtgtggcagatcaactcactgaagaacaaattgcagaattcaaagaggctttctccgtttttgacaaggacggtaatggcaccatcacaaccaatgagttaggtactgtgatgagatcacttggtctgaaacctaatgaggctgagcttcaagacatgatcaatgaagtggatgctgaatggaacggaatcatcgattttcccgaattcttgacgaaggttaggaagatgaaggaaacacaaagcgaagtagaaatgagagaagctttcagagtcttcgacatggatggcaacggtttcatcagttttgctgagttgcgccacgtgatgacgcatcttggagaaaagctgacagacgatgaggtagatgaaatgatcagggaagcagatattgatggtgatggtcaagtcaactatgaagaattcgtgtctatgatgaccagcaagtaa

SEQ ID NO: 3329 - protein, 151 aa, Strongylocentrotus purpuratus
MACVADQLTEEQIAEFKEAFSVFDKDGNGTITTNELGTVMRSLGLKPNEAELQDMINEVDAEWNGIIDFPEFLTKVRKMKETQSEVEMREAFRVFDMDGNGFISFAELRHVMTHLGEKLTDDEVDEMIREADIDGDGQVNYEEFVSMMTSK

SEQ ID NO: 3330 - DNA, 522 bp, Strongylocentrotus purpuratus
  CDS (1)..(522)
atgattcgtgcctgtggcaacggcatccaaatccattctcactttgctggaccgatccaatggtccgctccaggggctgatcaactcactgaagagcaaatagcagaattcaaagaggctttctccctttttgacaaggatggtgatggcaccataacaaccaaggagttgggtactgtgatgagatcacttggtcagaaccctactgaggctgagcttcaagacatgatcaatgaagtggatgctgatggtaacggaacaatcgactctcctgaattcctggcgatgatggcaaagaagatgaaggatacagacagcgaagaagatatcagagaagctttcagagtcttcgacaaggatggcaacggttatatcagtgctgccgagctacgtcacgtgatgacaaacattggtgaaaatttgacgatcgaagaggtcgatgaaatgatcagggaagccgacgttgatggtgacggccaggtcgattatgaagaattcgtcactatgatgaccttcaagtga

SEQ ID NO: 3331 - protein, 173 aa, Strongylocentrotus purpuratus
MIRACGNGIQIHSHFAGPIQWSAPGADQLTEEQIAEFKEAFSLFDKDGDGTITTKELGTVMRSLGQNPTEAELQDMINEVDADGNGTIDSPEFLAMMAKKMKDTDSEEDIREAFRVFDKDGNGYISAAELRHVMTNIGENLTIEEVDEMIREADVDGDGQVDYEEFVTMMTFK

SEQ ID NO: 3332 - DNA, 441 bp, Strongylocentrotus purpuratus
  CDS (1)..(441)
atgtctgtcactgaggatcaactttcggaaatgcaggagtgctttagtctcttcgacaagaggggagatggaaagattgatacagagcaactcggagatgtcatgagagccaacgggggtaatccaactcaggctgaagtcaggaaacttcttcaagattttgattctggacacagggtgccatttgaggagttcttaccaatcatgacagcaactatgaagaagaaggaacagggcacccaggatgaattcattgagggtctgagggtatttgaccaggagggtaatggctccatcaacttagctgagctccgacatgtgctcaccaacctgggtgagaagatgaccgatgaggaggttgacagtttggtgggtggatgtgaggatgctcaaggtcaagtcaactacgaagaatttgtcaagatggtgtgcagccgctaa

SEQ ID NO: 3333 - protein, 146 aa, Strongylocentrotus purpuratus
MSVTEDQLSEMQECFSLFDKRGDGKIDTEQLGDVMRANGGNPTQAEVRKLLQDFDSGHRVPFEEFLPIMTATMKKKEQGTQDEFIEGLRVFDQEGNGSINLAELRHVLTNLGEKMTDEEVDSLVGGCEDAQGQVNYEEFVKMVCSR

SEQ ID NO: 3334 - DNA, 447 bp, Drosophila pseudoobscura pseudoobscura
  CDS (1)..(447)
atgaccgaactaactgaggagcagattgcagagttcaaggaggctttcgccctgttcgacaaggatggcagtggctccatcaccacccgcgaattgggcatcctgatgcggtccctgggccaaaatcccaccgaggccgagcttcaggatctagtgaacgaggtcgacatcgatggcaatggcgagatcgatttcaacgagttctgccagatgatgggcaagcagatgcgggacactgacacggaggaggagatgcgcgaggccttcaagatctttgaccgcgaccttgacggcttcatatcgccggcagagctccgttttgtgatgatcaatctgggtgagaaggtcagcgacgaggagattgatgagatgatacgcgaggccgacttcgatggagatggcctgataaactacgaggagttcgtttggatgatcaaccaaaagtag

SEQ ID NO: 3335 - protein, 148 aa, Drosophila pseudoobscura pseudoobscura
MTELTEEQIAEFKEAFALFDKDGSGSITTRELGILMRSLGQNPTEAELQDLVNEVDIDGNGEIDFNEFCQMMGKQMRDTDTEEEMREAFKIFDRDLDGFISPAELRFVMINLGEKVSDEEIDEMIREADFDGDGLINYEEFVWMINQK

SEQ ID NO: 3336 - DNA, 447 bp, Drosophila pseudoobscura pseudoobscura
  CDS (1)..(447)
atggaggatctaacggatgaggagaacaagttcattgaggatgcattcgctgtaatggacaaggagtcggacggctccgtcaccgccaaggaattggccgtcctaatgcgttccctgggccgctctcccaccgacaacgagctccaggcgatgatcaacgaggtggatgcggatggcaacggctccatcgagctggaggagttcgccagcatgattatacgcaagatgcacgacaccaatcatgaggacgagctgcgggacgccttccgcatattcgacaaggagaacaatggctacatcacgtcatcggagctcaagttggtcctcacggccctgggcatgaagttgcctgacgacgagatagaggagatgattcgggagtacgacatcgaccaggatggccgtctcgactttgaggagttcgtcaacatgatgacgacccgttag

SEQ ID NO: 3337 - protein, 148 aa, Drosophila pseudoobscura pseudoobscura
MEDLTDEENKFIEDAFAVMDKESDGSVTAKELAVLMRSLGRSPTDNELQAMINEVDADGNGSIELEEFASMIIRKMHDTNHEDELRDAFRIFDKENNGYITSSELKLVLTALGMKLPDDEIEEMIREYDIDQDGRLDFEEFVNMMTTR

SEQ ID NO: 3338 - DNA, 486 bp, Magnaporthe grisea 70-15
  CDS (1)..(486)
atgccagcccaaactctctccaatgaccaactcaagcaacttaaagatgtttttgacctgatcgacaaggatggaaccggtgccatctcagcctccgaattcgccgaggccatggagtccctcggtttgagctcctcggccgccgaggcgcaggaaattatcagcgagatagaccagaacaaggacggccagatcgactttcacgagtttcttcgggtcatgtcgcatcccgagacacacgatgccctgagccccaacgagaggagtaaggactccaaaaaggacgagcgtgagctgctcgctgccttcaaggtctttgattcggacggcagcgggtccatctcccccgaggagctgcgccatgccctgcggcccctaggttataccccggctgagatcgacgaaatgattgcccatgccgacctggatgggaacgggtcgatcgactaccaagaatttgtggagctcatgtcgcagaagcattag

SEQ ID NO: 3339 - protein, 161 aa, Magnaporthe grisea 70-15
MPAQTLSNDQLKQLKDVFDLIDKDGTGAISASEFAEAMESLGLSSSAAEAQEIISEIDQNKDGQIDFHEFLRVMSHPETHDALSPNERSKDSKKDERELLAAFKVFDSDGSGSISPEELRHALRPLGYTPAEIDEMIAHADLDGNGSIDYQEFVELMSQKH

SEQ ID NO: 3340 - DNA, 774 bp, Nasonia vitripennis (jewel wasp)
  CDS (1)..(774)
atgtacggagcagagcaacagaagcagcagcagcctttggccgagtttgtcatgcacgagagcatgtcgaatgaaaagagagctcgcaacaaaccggcagatggtcatgtcggtcaaaaaggcgcgaccggtcagaaggcaccgctggccgccggtcagaaggtggcgccgggcggcaagtcggccgcgaaacccgccaccaagccgagcgcgcaaaaaggccaggtcaaggtcacgccgaaagccgcctgtgtcaagaccggcaagaacaagaagaagggacagcggcaacagtacgacctcatcgtcaccattaatctgtccgagtatgggctcacggaggaccaagtcgcggaattcaaagaagctttcatgctgttcgacaaggacgaggacggcaccatcacgatggctgaactgggagttgtcatgcgttcactgggacaaagaccatccgagacggaattacgagatatggtgaacgaagtcgatcaggatggcaacggcacaatcgaattcaacgagttcctacaaatgatgtcgaagaaaatgaagggagccgagggcgaggatgaactgcgcgaggctttcagagtattcgataaaaacaacgacggcttgatatcgtcggtggaactgcgacacgtcatgacgaatctcggtgagaagctgtccgaggaagaggtggacgacatgatcaaggaagcagacttggacggagacgggatggtgaactacgaagagttcgtgacaatcctgacgtcgaagaattag

SEQ ID NO: 3341 - protein, 257 aa, Nasonia vitripennis (jewel wasp)
MYGAEQQKQQQPLAEFVMHESMSNEKRARNKPADGHVGQKGATGQKAPLAAGQKVAPGGKSAAKPATKPSAQKGQVKVTPKAACVKTGKNKKKGQRQQYDLIVTINLSEYGLTEDQVAEFKEAFMLFDKDEDGTITMAELGVVMRSLGQRPSETELRDMVNEVDQDGNGTIEFNEFLQMMSKKMKGAEGEDELREAFRVFDKNNDGLISSVELRHVMTNLGEKLSEEEVDDMIKEADLDGDGMVNYEEFVTILTSKN

SEQ ID NO: 3342 - DNA, 465 bp, Aedes aegypti (Stegomyia aegypti)
  CDS (1)..(465)
atgtccgcccaaaccccgccagacaagctttcccaggatcaaatcgaagaactgcgggaagctttctccctgttcgacaccaacggcgacggaaccataacctgttcagaacttggcacagtccttcgatcccttggcaaaaatgtatccgacgcggaagtggaagaactgctcaaagaagtcaacgtcgaccacgaaggaatgatccactttccggacttcgtggcaatgatgtccatccgattgcgggacttcaatagcgaggaggaactcaaggaagccttccggatcttcgaccgcaacggagatgggctgatttcggcggacgaattgcgagcggctctccaatctttcggggaacagctggccgaggaggaaatcgaagaactgctccgggaggcggatgtcaactgcgacggacaaatagactacgaggagtttgttaaaatgatcacgctgaaataa

SEQ ID NO: 3343 - protein, 154 aa, Aedes aegypti (Stegomyia aegypti)
MSAQTPPDKLSQDQIEELREAFSLFDTNGDGTITCSELGTVLRSLGKNVSDAEVEELLKEVNVDHEGMIHFPDFVAMMSIRLRDFNSEEELKEAFRIFDRNGDGLISADELRAALQSFGEQLAEEEIEELLREADVNCDGQIDYEEFVKMITLK

SEQ ID NO: 3344 - DNA, 450 bp, Aedes aegypti (Stegomyia aegypti)
  CDS (1)..(450)
atgtccgcccatagtctaacagaggaacaagggcgccagttccgtcagatgttcgagatgttcgacaaaaatggcgacggttcgatcagcacatcggaactgggatcggtcattcgggccttgggtatgaatccctccattgcggaaatcgagcaaatgatccacgaggtcgatttggacggaagtgggtcgattgagttgaacgaatttctcatactgatggcacgtaagtcacgggagggttccacacaggaagagctacgggatgcgttcaaaatttttgacaaggatggagatggatttctcacggttgacgagttgtcggctgttatgaagaactttggcgagagattgaccgatgacgaactagcagatctgctggaggaagccgacatcgatggagacggaaagatcaactatgaagaatttgtcatcatgttgagcaagtga

SEQ ID NO: 3345 - protein, 149 aa, Aedes aegypti (Stegomyia aegypti)
MSAHSLTEEQGRQFRQMFEMFDKNGDGSISTSELGSVIRALGMNPSIAEIEQMIHEVDLDGSGSIELNEFLILMARKSREGSTQEELRDAFKIFDKDGDGFLTVDELSAVMKNFGERLTDDELADLLEEADIDGDGKINYEEFVIMLSK

SEQ ID NO: 3346 - DNA, 450 bp, Physcomitrella patens subsp. patens
  CDS (1)..(450)
atggtggaacagcttagcgaggaccagattgccgagttcaaggaagctttcagtctgttcgataaggatggcgacggttccatcaccaccaaggagctcggcactgtcatgaggtctttgggacagaatcctacagaagccgagcttcaggatatgattagtgaagtcgatgccgacgggaacggtacaattgattttgctgagttcctcaaccttatggctcgtaagatgaaagactcggactctgaggaagagttgaaagaggccttccgtgtgttcgacaaggaccagaatggttttatttcagcagctgagctcaggcatgtgatgacaaacctaggggagaagcttacggacgatgaagttgacgagatgatccgtgaggctgatgtggatggagatggtcagatcaactatgaggagttcgtgaagatgatgatggccaagtaa

SEQ ID NO: 3347 - protein, 149 aa, Physcomitrella patens subsp. patens
MVEQLSEDQIAEFKEAFSLFDKDGDGSITTKELGTVMRSLGQNPTEAELQDMISEVDADGNGTIDFAEFLNLMARKMKDSDSEEELKEAFRVFDKDQNGFISAAELRHVMTNLGEKLTDDEVDEMIREADVDGDGQINYEEFVKMMMAK

SEQ ID NO: 3348 - DNA, 450 bp, Physcomitrella patens subsp. patens
  CDS (1)..(450)
atggtggaacagctatcagaggagcagatcgctgagttcaaggaggcattcagcctgtttgacaaggatggagatggttccatcaccaccaaggagctcgggacagtgatgaggtctctcgggcaaaatccaactgaagctgagcttcaggacatgattaatgaagttgacgctgatgggaacgggaccattgattttgctgagtttctgaacctaatggcgagaaagatgaaagatactgattctgaggaagaactgaaagaagctttccgagtgtttgacaaggaccaaaatgggttcatttctgctgccgagctgaggcacgtcatgaccaaccttggtgaaaagctcactgacgacgaggtagatgaaatgatccgcgaggctgacgtcgatggagatggtcagatcaactacgaagagtttgtgaagatgatgatggccaagtag

SEQ ID NO: 3349 - protein, 149 aa, Physcomitrella patens subsp. patens
MVEQLSEEQIAEFKEAFSLFDKDGDGSITTKELGTVMRSLGQNPTEAELQDMINEVDADGNGTIDFAEFLNLMARKMKDTDSEEELKEAFRVFDKDQNGFISAAELRHVMTNLGEKLTDDEVDEMIREADVDGDGQINYEEFVKMMMAK

SEQ ID NO: 3350 - DNA, 450 bp, Physcomitrella patens subsp. patens
  CDS (1)..(450)
atggtggagcagctaaccgaggatcagattgccgagttcaaggaggcttttagcctgttcgacaaggatggcgatggttccattactaccaaggagcttggaaccgtgatgagatcactggggcagaatcccacagaagctgaactgcaggacatgattaatgaagtcgatgccgatggcaacggcactattgattttgctgaatttctgaaccttatggctcgtaagatgaaagacactgattctgaggaagaattgaaagaggctttccgcgtgttcgacaaggatcagaatggctttatttctgctgccgagctgaggcacgtgatgactaatttaggtgaaaaactcacagatgacgaagtggatgagatgattcgggaagccgatgtggatggagacggccagatcaattacgaggaatttgtgaaaatgatgatggctaaatag

SEQ ID NO: 3351 - protein, 149 aa, Physcomitrella patens subsp. patens
MVEQLTEDQIAEFKEAFSLFDKDGDGSITTKELGTVMRSLGQNPTEAELQDMINEVDADGNGTIDFAEFLNLMARKMKDTDSEEELKEAFRVFDKDQNGFISAAELRHVMTNLGEKLTDDEVDEMIREADVDGDGQINYEEFVKMMMAK

SEQ ID NO: 3352 - DNA, 450 bp, Physcomitrella patens subsp. patens
  CDS (1)..(450)
atggcggagcacttgactgaagagcagattgctgagttcaaggaggcgttcagtttatttgacaaggatggcgatggtagcatcacgaccaaggagctgggaacagtaatgcggtcgctgggtcagaatcccaccgaggcagagttgcaggacatgatcaatgaggttgatgccgatggaaacggcactatcgattttcccgagtttctaaacctcatggcccggaaaatgaaggataccgactctgaggaggagttgaaggaagcgtttaaagtattcgataaggatcagaatggcttcatctctgctgcggagctccggcacgtgatgaccaacctgggggaaaagctgacagacgaagaagtagatgagatgatccgcgaggccgatgtggatggtgacggccaggtcgactacgacgagtttgtgaagatgatgaaggcaaagtag

SEQ ID NO: 3353 - protein, 149 aa, Physcomitrella patens subsp. patens
MAEHLTEEQIAEFKEAFSLFDKDGDGSITTKELGTVMRSLGQNPTEAELQDMINEVDADGNGTIDFPEFLNLMARKMKDTDSEEELKEAFKVFDKDQNGFISAAELRHVMTNLGEKLTDEEVDEMIREADVDGDGQVDYDEFVKMMKAK

SEQ ID NO: 3354 - DNA, 450 bp, Physcomitrella patens subsp. patens
  CDS (1)..(450)
atggcggagcacttgactgaagaacagattgccgagtttaaggaggcgtttagcttgtttgacaaggatggcgacggtagcatcactaccaaggagctgggaacagtgatgcggtcgttgggtcagaatcccaccgaagctgagctacaggacatgatcaacgaagttgatgccgatggcaatggtaccatcgatttccccgagtttttgaacctcatggcccgcaaaatgaaggacacagattccgaggaggagttgaaggaggcgtttaaagtgttcgacaaggaccagaatggcttcatctccgccgcagagctccggcacgtgatgaccaacctgggcgagaaactgacagacgaagaggttgatgagatgatccgcgaggctgatgtagatggtgatggccaggtcaactacgaggagtttgtgaggatgatgatggcaaaatag

SEQ ID NO: 3355 - protein, 149 aa, Physcomitrella patens subsp. patens
MAEHLTEEQIAEFKEAFSLFDKDGDGSITTKELGTVMRSLGQNPTEAELQDMINEVDADGNGTIDFPEFLNLMARKMKDTDSEEELKEAFKVFDKDQNGFISAAELRHVMTNLGEKLTDEEVDEMIREADVDGDGQVNYEEFVRMMMAK

SEQ ID NO: 3356 - DNA, 495 bp, Coprinopsis cinerea okayama7#130 (Coprinus cinereus okayama7#130)
  CDS (1)..(495)
atgtacacttcatcagcagtccaacgagcgaaacgacgaacacacaagactgagctcaccgaggaacagaaacaggagatcaaggaggcctttgagctgttcgacaccgacaaggatggctgcatagactatcacgagctcaaggtcgcaatgcgggcgctgggattcgatatgaagaaggcggaggtgctgaagattctgagagaccacgacaaaaccggtcagaatctcatggattttgaagactttgccaaagtcatgagcgataaaatccaagcacgcgacccaatagaagaaattcgacgcgcgttccagctctttgacgacgaccaaacgggaaagatcagtctccgcaatctgcgacgcgtggcgaaggacattggcgaccggttagaggatgacgagctacaagccatgatcgacgagttcgacctcgatggcgacggcgaaatcaacgaacaagaattcctggctatcatgaccgacgaagcctag

SEQ ID NO: 3357 - protein, 164 aa, Coprinopsis cinerea okayama7#130 (Coprinus cinereus okayama7#130)
MYTSSAVQRAKRRTHKTELTEEQKQEIKEAFELFDTDKDGCIDYHELKVAMRALGFDMKKAEVLKILRDHDKTGQNLMDFEDFAKVMSDKIQARDPIEEIRRAFQLFDDDQTGKISLRNLRRVAKDIGDRLEDDELQAMIDEFDLDGDGEINEQEFLAIMTDEA

SEQ ID NO: 3358 - DNA, 447 bp, Coprinopsis cinerea okayama7#130 (Coprinus cinereus okayama7#130)
  CDS (1)..(447)
atggccgaccaactgtctgaagagcaaatttctgagttcaaggaggcgttctcccttttcgacaaggatggcgatggcacgattaccaccaaggagctcggaaccgttatgcgctcgttgggccagaaccccaccgaggctgaattgcaggacatgatcaacgaggtcgatgcggatggaaacggcacgattgacttccccgagttccttaccatgatggcccgcaagatgcgcgacaccgatagtgaggaggagatcaaggaggcgttcaaggtcttcgacaaggatgggaacggttatatcagcgcggctgagttgcgccatgttatgaccaaccttggcgagaagttgtccgactctgaagtcgatgagatgatcagggaggctgatgttgatggagacggccaaatcaactacgagggtatgcttcgatgggttctgggatga

SEQ ID NO: 3359 - protein, 148 aa, Coprinopsis cinerea okayama7#130 (Coprinus cinereus okayama7#130)
MADQLSEEQISEFKEAFSLFDKDGDGTITTKELGTVMRSLGQNPTEAELQDMINEVDADGNGTIDFPEFLTMMARKMRDTDSEEEIKEAFKVFDKDGNGYISAAELRHVMTNLGEKLSDSEVDEMIREADVDGDGQINYEGMLRWVLG

SEQ ID NO: 3360 - DNA, 441 bp, Coprinopsis cinerea okayama7#130 (Coprinus cinereus okayama7#130)
  CDS (1)..(441)
atgagcgacaacgcagaatacaaagaggcttttgccctattcgataaacgcggaacaggagctgtaccgagggaggtgctgggcgatctgttgcgtgcactgggccagaaccccacacaggctgaggttgccgagattgtcgcttctgctcctagggatgtggactacaagaccttcctgacgatcctcaaccgaccagatggcttcaagcccgccggaacgccaggtgaggatgtcttcgaggaattcatccgcggcttccaagtcttcgacaaagaaggcaacggcttcatcggtgctggtgaactgcgctacgtccttacgcagcttggagagaagatgacggatgaggaggtggatgagttgttgaagggtgtgcagattggagccgacggaaacgtcaactatgaatcgtttgttcgtacgatcctctcgcagtag

SEQ ID NO: 3361 - protein, 146 aa, Coprinopsis cinerea okayama7#130 (Coprinus cinereus okayama7#130)
MSDNAEYKEAFALFDKRGTGAVPREVLGDLLRALGQNPTQAEVAEIVASAPRDVDYKTFLTILNRPDGFKPAGTPGEDVFEEFIRGFQVFDKEGNGFIGAGELRYVLTQLGEKMTDEEVDELLKGVQIGADGNVNYESFVRTILSQ

SEQ ID NO: 3362 - DNA, 504 bp, Culex quinquefasciatus (southern house mosquito)
  CDS (1)..(504)
atgaagtccggccgtcgccttcgccaccggaaccggtttgaggcggttcttggtcaggccgatcaacttacagaggaacagatcgccgagttcaaagaagcgttctcgctgttcgacaaagacggtgacggcacgatcacgaccaaggagctgggcaccgtgatgcgatcgttaggccagaaccccacagaagcagagctgcaagacatgataaacgaggtcgatgcggacggcaacggcacgatcgacttccccgagtttctcaccatgatggctcgcaaaatgaaggacaccgatagcgaagaggaaatccgggaggcgttccgagtcttcgacaaggacggcaacggcttcatctcggcggccgagctgcgccacgtcatgaccaatctcggcgagaagctcacggacgaggaggtggatgagatgatccgcgaggccgacattgacggcgatggccaagttaattatgaagaattcgtaacaatgatgacatcgaagtga

SEQ ID NO: 3363 - protein, 167 aa, Culex quinquefasciatus (southern house mosquito)
MKSGRRLRHRNRFEAVLGQADQLTEEQIAEFKEAFSLFDKDGDGTITTKELGTVMRSLGQNPTEAELQDMINEVDADGNGTIDFPEFLTMMARKMKDTDSEEEIREAFRVFDKDGNGFISAAELRHVMTNLGEKLTDEEVDEMIREADIDGDGQVNYEEFVTMMTSK

SEQ ID NO: 3364 - DNA, 477 bp, Culex quinquefasciatus (southern house mosquito)
  CDS (1)..(477)
atgtcatcgtcttcccgccaccccaaacccaccgcggaccccctgaccaaggagcaaatcgaagaactgcgcgaagcgttcaccctgttcgacaccaacggcgacggaacgatttccggctcggaactgtccaccgtgctgcgggccctcggcaagaacgtctcggacgccgaagtcgaggaactgctgaaggaggtccgcaccgacgacgagggccgcatccggttcggggactttgtggccatgatgacggtccggttgaaggactttaacaacgaggaccagctgcaggaggcgtttcggatcttcgatcgggacgggaatgggcggatttcggcggaagagctacgggtcgcgttgaggtcgtttggggagcagttgaccgaagaggagctggaggagttgctgcgcgaggcggacgtcaacagtgacggccagattgactacggggagtttgtgcggatgataacgcagtga

SEQ ID NO: 3365 - protein, 158 aa, Culex quinquefasciatus (southern house mosquito)
MSSSSRHPKPTADPLTKEQIEELREAFTLFDTNGDGTISGSELSTVLRALGKNVSDAEVEELLKEVRTDDEGRIRFGDFVAMMTVRLKDFNNEDQLQEAFRIFDRDGNGRISAEELRVALRSFGEQLTEEELEELLREADVNSDGQIDYGEFVRMITQ

SEQ ID NO: 3366 - DNA, 450 bp, Culex quinquefasciatus (southern house mosquito)
  CDS (1)..(450)
atgtcggcccactcgctcaccgacgaacagcagcgccagtaccggcaaatgttcgaaacgttcgacaaggatggcaacggttccatcacgacgacggaactgggaacgctagtgcgagcgctaggtcttaatccttcgatcgccgagatcgagcagatgatccacgaggtcgacctggacggaagcgggacgatcgagctgaacgagttttacgtgctgatggcccggaagcatcgggaagcctcgtcggaggacgagctgaggcaggctttcaaggtgtttgacaagaacgaggatgggttcttgacggtggaggaactgtcgatggtgatgaagaactttggtgagcggttgagcgatgaagagttggcggatttgttggaggaggcggatgttgacaaggacggtcggattaattacgaggaatttgtgaccatgttgaccaagtag

SEQ ID NO: 3367 - protein, 149 aa, Culex quinquefasciatus (southern house mosquito)
MSAHSLTDEQQRQYRQMFETFDKDGNGSITTTELGTLVRALGLNPSIAEIEQMIHEVDLDGSGTIELNEFYVLMARKHREASSEDELRQAFKVFDKNEDGFLTVEELSMVMKNFGERLSDEELADLLEEADVDKDGRINYEEFVTMLTK

SEQ ID NO: 3368 - DNA, 492 bp, Acyrthosiphon pisum (pea aphid)
  CDS (1)..(492)
atgagaagtaagaacacttacaacaacattttatttcagaatgaatttggtttgtcggaagatcaagttgcggaattcaaagaagcatttatgttgttcgataaagaccatgatggacggattactgaggcagaactaggagtggtcatgagatctttgggtcaaaggcctactgaaactgatttgcgaggtatggttaaagaagtggataaagatggcaatggtagtattgagtttgatgaattcctgctaatgatggctagaaaactaaaagcagcagatggcgaggaagaaatgcaccaagcttttaaagtatttgacaaaaatggcgatggattcataacatttgatgaactcaaacgtgttatgtgcagtatcggagaaaggctcactgatgaagaaattgaggacatgataaaagaagcagatttaaatggtgataaaaaaattgattataaagaatttattacaataataagttctaagaaataa

SEQ ID NO: 3369 - protein, 163 aa, Acyrthosiphon pisum (pea aphid)
MRSKNTYNNILFQNEFGLSEDQVAEFKEAFMLFDKDHDGRITEAELGVVMRSLGQRPTETDLRGMVKEVDKDGNGSIEFDEFLLMMARKLKAADGEEEMHQAFKVFDKNGDGFITFDELKRVMCSIGERLTDEEIEDMIKEADLNGDKKIDYKEFITIISSKK

SEQ ID NO: 3370 - DNA, 447 bp, Drosophila ananassae
  CDS (1)..(447)
atgagcgacctaacagaggaacaggtggccgagttcaaggaagcctttatacagttcgacaaggatggcaccggcaagatctccacccgagaactgggggccgtgatgcgtgccctgggccagaatcccaccgagtccgagctgcaggacatgatcgcggaaattgacaacgacccgaatggccaaatcgacttcaacgaattctgctcaatgatggccaagcaaatgcgggaaacggacaccgaggaggagatgcgcgaagccttcaagatcttcgaccgcgattgcgacggattcatctcaccggctgagctccgattcgtgatgatcaatctgggcgagaaggtcactgacgaggagatcgacgagatgatccgcgaggccgactttgacggtgacggcatgatcaactacgaggagttcgtctggatgattggccagaaatag

SEQ ID NO: 3371 - protein, 148 aa, Drosophila ananassae
MSDLTEEQVAEFKEAFIQFDKDGTGKISTRELGAVMRALGQNPTESELQDMIAEIDNDPNGQIDFNEFCSMMAKQMRETDTEEEMREAFKIFDRDCDGFISPAELRFVMINLGEKVTDEEIDEMIREADFDGDGMINYEEFVWMIGQK

SEQ ID NO: 3372 - DNA, 456 bp, Drosophila ananassae
  CDS (1)..(456)
atggctgtgagtcagttgaccaaagagcagtttgacgagctgaaggaggctttcgacaagttcgatgtggaccgcaatggcagcatctcgccgagcgaaatgcgtcgggcgatgctgtcgttgggtcacgagatcaccgaagcggaactgttcgagctcatcgactcggtggcctcggacgaggactacaacatccatatgaatgccttcatccacctgatggctccccggatgatcgatgtggacagcgaggagagcctgaggcgcaccttcaggctgttcgatcgcgacaaagacggctatatcggtacccaggacatgcgttctactatgcaggtcctgggcatcgttctaaccgacgacgaaatcaatgacatctgccgggaggtggacgtcgactgtgatggtcgcataaatctgcgcgactttataaacttcatgtatagtgccgtatag

SEQ ID NO: 3373 - protein, 151 aa, Drosophila ananassae
MAVSQLTKEQFDELKEAFDKFDVDRNGSISPSEMRRAMLSLGHEITEAELFELIDSVASDEDYNIHMNAFIHLMAPRMIDVDSEESLRRTFRLFDRDKDGYIGTQDMRSTMQVLGIVLTDDEINDICREVDVDCDGRINLRDFINFMYSAV

SEQ ID NO: 3374 - DNA, 447 bp, Drosophila ananassae
  CDS (1)..(447)
atggaagaactctccaatgaggagcaagaattaatccgggatgccttccggataatggacagggagaacgaaggcgccatcacctccaaggagctggcggtagttatccgtgctctgggccgtcagccgaccgacaacgaggtccagagcatcatcaacgaggtggactctgacggcaatggctccattgaaggacccgagttctgtaatgtgattttgcgaaaattgcgagacactaatgtcgaggaggagctgcgggaggccttcagggtattcgacaaagagaaccagggctacctgtcgaccaccgagctgaagaatgtctatacggccctgggggtcaagatcggtgacgatgagcttgaggagatgatccgagagcacgacgtcgatcaggacaatcacctcaactacgaggagttcgtcaacatgatgacgttgcgatag

SEQ ID NO: 3375 - protein, 148 aa, Drosophila ananassae
MEELSNEEQELIRDAFRIMDRENEGAITSKELAVVIRALGRQPTDNEVQSIINEVDSDGNGSIEGPEFCNVILRKLRDTNVEEELREAFRVFDKENQGYLSTTELKNVYTALGVKIGDDELEEMIREHDVDQDNHLNYEEFVNMMTLR

SEQ ID NO: 3376 - DNA, 456 bp, Drosophila ananassae
  CDS (1)..(456)
atggatcctccggaatacactcttcctgccgatctccgcgacgagatcaaccatgcctttgctcactgtgatccggatcacactggctccattaccacggataatctgggcactttgatgcgtgccattggccagaatcccaccgaatcggaactgtacagactcatcgaggagctggacaagtttgcaactggaagtatattctatgaggatttcttagagttgatgaccaaaaactatcaggtgctcgacaaggaggacatcatcaagaatgcatttaaaacattcgatcgcgatgaggatggcttcatatcccatgccgagctgcgcactgtcttcaacaatgtgggcgagaagctcaccgacgaggagttcgacgacatattccgggaggtggacatcgacggggatggcgtcattaactggaaggatttttaccaagctttcaagggctaa

SEQ ID NO: 3377 - protein, 151 aa, Drosophila ananassae
MDPPEYTLPADLRDEINHAFAHCDPDHTGSITTDNLGTLMRAIGQNPTESELYRLIEELDKFATGSIFYEDFLELMTKNYQVLDKEDIIKNAFKTFDRDEDGFISHAELRTVFNNVGEKLTDEEFDDIFREVDIDGDGVINWKDFYQAFKG

SEQ ID NO: 3378 - DNA, 447 bp, Drosophila erecta
  CDS (1)..(447)
atggatgaattgaccactgaggagcaggacctgttcaaaaaaacctttaagatattggacacggagaacgaaggagccatcacctcgaaggaattgggactggtaattcgcgcaataggtcggcagcccaacgaagcggaggttcagtccttgataaacgaggtggactccgatggaaatggaaccatttcggctgccgagttttacaatgtgattctgcgcaagatgcgtgacacaagtaaggaggaggagctgcgcgatgcctttagtgtttttgataaggagaacaatgggtacatatccgctaccgagttgagggctgtcttcatggcacttggcgaaaaattggaagacgacgagctggaggagatgatacgcgagtacgatgtcgatcaggacaatcacatcaatttcgaggagtttaccaacatgatgaccacgcgttag

SEQ ID NO: 3379 - protein, 148 aa, Drosophila erecta
MDELTTEEQDLFKKTFKILDTENEGAITSKELGLVIRAIGRQPNEAEVQSLINEVDSDGNGTISAAEFYNVILRKMRDTSKEEELRDAFSVFDKENNGYISATELRAVFMALGEKLEDDELEEMIREYDVDQDNHINFEEFTNMMTTR

SEQ ID NO: 3380 - DNA, 447 bp, Drosophila erecta
  CDS (1)..(447)
atggaagatattacacatgaggagcaaatccttatccttgacaccttccgcattttggacaaggagaacgagggcgctataacttctaaagagatggcggtggtgattcgcgccctgggtcgccagcccaacgacgccgaggttcagtcaatgatcaatgaggtggactcggagggaaacggatccatcgaggctccggagttctgcaatgtgatcctgcgcaagatgcgcgacacaagccacgaggaagagttgcgcgaagctttccggattttcgacaaggagaacaacggctacattacctccaccgagttaaaaaatgtgttcactgcgctgggcgtgaagcctagcgacgaggagttggatgaaatgatacgcgagtacgatctggaccaggacaaccacatcaattacgaggagtttgttaacatgatgacaatgcgttag

SEQ ID NO: 3381 - protein, 148 aa, Drosophila erecta
MEDITHEEQILILDTFRILDKENEGAITSKEMAVVIRALGRQPNDAEVQSMINEVDSEGNGSIEAPEFCNVILRKMRDTSHEEELREAFRIFDKENNGYITSTELKNVFTALGVKPSDEELDEMIREYDLDQDNHINYEEFVNMMTMR

SEQ ID NO: 3382 - DNA, 447 bp, Drosophila erecta
  CDS (1)..(447)
atgtcggaactaacggaggagcagatagccgagttcaaggatgccttcgtccagttcgacaaggagggaaccggcaagatcgccacccgtgagctgggcaccttgatgcgcaccctgggccagaatcccacggaggccgagttgcaggatttaattgccgatgccgacaataacagcaatggccaactggacttcactgagttctgtggtatcatggcaaagcaaatgcgtgaaacggatacggaggaggaaatgcgggaggctttcaagatttttgatcgcgatggcgatggctttatatcaccagctgagcttcgctttgtaatgattaatctcggcgagaaggtcaccgatgaagagatcgacgagatgatacgcgaggctgattttgatggggatggcatgatcaactacgaggaattcgtttggatgataagccagaagtag

SEQ ID NO: 3383 - protein, 148 aa, Drosophila erecta
MSELTEEQIAEFKDAFVQFDKEGTGKIATRELGTLMRTLGQNPTEAELQDLIADADNNSNGQLDFTEFCGIMAKQMRETDTEEEMREAFKIFDRDGDGFISPAELRFVMINLGEKVTDEEIDEMIREADFDGDGMINYEEFVWMISQK

SEQ ID NO: 3384 - DNA, 456 bp, Drosophila grimshawi
  CDS (1)..(456)
atggctaacaaccttgatattagtgaagagcaaattgccgagtacagggaagcctttatgctgttcgataagaaccaatcgggtaggatcagcacccgcgagcttggcaatctgatgcgttcgcttggcgagaatcccaccgaggtggagctcagggatatgattaatgaagtcgacaccagtggcgatggcgagattgactttcaggaattctgccagttgatgtccagacagtcgcacgagaatgacacagaggaggagctgcgcgaggcattcaaaatatttgacaaggacgaggatggctttatctcgccagctgagctgcgcttcgttatgatcaatatcggtgagaagctaaccgatgaggagatcgacgatatgatacgcgaggcggactttgatggcgatggcaaaatcgactacgaggagtttgtctacatgataacgcaaaagtaa

SEQ ID NO: 3385 - protein, 151 aa, Drosophila grimshawi
MANNLDISEEQIAEYREAFMLFDKNQSGRISTRELGNLMRSLGENPTEVELRDMINEVDTSGDGEIDFQEFCQLMSRQSHENDTEEELREAFKIFDKDEDGFISPAELRFVMINIGEKLTDEEIDDMIREADFDGDGKIDYEEFVYMITQK

SEQ ID NO: 3386 - DNA, 450 bp, Drosophila mojavensis
  CDS (1)..(450)
atgaatccagatctgactgaggagcaaattgccgaatacaaagaggcgttcgccctctttgacaagagcaacacgggcatgatcagcgttcgtgagctgggcaatctgatgcgctcgctcggacagaatcccaccgatgccgagctgagggatctggtcaatgaggtggacaccactggcaatggctcgattgagttcgttgagttctgcaatttgatgtcgaagcagtcggtggacagcgatgccgacgaggagctccgcgaggcatttaagatctttgacaaggacgaggacggtttcatatctccagccgagctgcgctttgtgatggtcaatttgggcgagaagctaaccgacgaggagatcgacgacatgatacgtgaggcagacttcgatggcgatggcaaaatcaactacgaagagttcgtctatatgataactcaaaagtaa

SEQ ID NO: 3387 - protein, 149 aa, Drosophila mojavensis
MNPDLTEEQIAEYKEAFALFDKSNTGMISVRELGNLMRSLGQNPTDAELRDLVNEVDTTGNGSIEFVEFCNLMSKQSVDSDADEELREAFKIFDKDEDGFISPAELRFVMVNLGEKLTDEEIDDMIREADFDGDGKINYEEFVYMITQK

SEQ ID NO: 3388 - DNA, 453 bp, Drosophila mojavensis
  CDS (1)..(453)
atgaatccagcggacctaactgaagagcaaattgcagactttaaagaggcctttcttctcttcgataaagaaaattctggcgtgattaactctcggcaattgggaaatttaatgcgatcactcggccaaaatcccaccgatattgaactgaaggatatgttgaacgatgttgatgtcactggcaaggagcaaatcgactttgataaattctgtagcctcatgtgcagacatgcgcaggagaatgatttagacgaggagttccgagaggcattcatgatctttgacaggaatgaggacggtttcatatctccagccgagctgcgctttgtgatggccaatttgggcgaaaagttaaccgacgaggagattgatgatatgatacgagaggccgacttcgatggcgatggcaaaatcgactacgaagagttcatctatatgatatcaccgaaataa

SEQ ID NO: 3389 - protein, 150 aa, Drosophila mojavensis
MNPADLTEEQIADFKEAFLLFDKENSGVINSRQLGNLMRSLGQNPTDIELKDMLNDVDVTGKEQIDFDKFCSLMCRHAQENDLDEEFREAFMIFDRNEDGFISPAELRFVMANLGEKLTDEEIDDMIREADFDGDGKIDYEEFIYMISPK

SEQ ID NO: 3390 - DNA, 447 bp, Drosophila persimilis
  CDS (1)..(447)
atggaggatctaacggatgaggagaacaagttcattgaggatgcattcgctgtaatggacaaggagtcggacggctccgtcaccgccaaggaattggccgtcctaatgcgttccctgggccgctcgcccaccgacaacgagctccaggcgatgatcaacgaggtggatgcggatggcaacggctccatcgagctggaggagttcgccagcatgattatacgcaagatgcacgacacgaaccatgaggacgagctgcgggacgccttccgcgtcttcgacaaggagaacaatggctacatcacgtcatcggagctcaaggtggtcctcacggccctgggcatgaagttgcccgacgacgagatagaggagatgattcgggagtacgacatcgaccaggatggccgtctcgactttgaggagttcgtcaacatgatgacgacccgttag

SEQ ID NO: 3391 - protein, 148 aa, Drosophila persimilis
MEDLTDEENKFIEDAFAVMDKESDGSVTAKELAVLMRSLGRSPTDNELQAMINEVDADGNGSIELEEFASMIIRKMHDTNHEDELRDAFRVFDKENNGYITSSELKVVLTALGMKLPDDEIEEMIREYDIDQDGRLDFEEFVNMMTTR

SEQ ID NO: 3392 - DNA, 450 bp, Drosophila persimilis
  CDS (1)..(450)
atggctgccacaaacctaacattcgatcagatcgaagagattcgcgaggccttccaggtgttcgatcgcgagaacaaaggatgcatcacctgcaaggagctgggaactgtgatgcgttcgctgggccagaaccccactgaggcggagctgtacgatatgattgacgagatcgatctggacggggatgggacgatcgacttctccgagttcctgtacatgatgtcgcaacggatggaggacctcggcagcgaggagtccctgctgctgggcttcaagatcttcgatcgcgacgacaatggctatataagcaccctcgagctgaagaccaccatgatgatgctcggcgagaaggtgacggacgaggaggtgcgcgaaatcatggccgaaatcgatcaggatcacgatggcaggatcagctacgccgagtttctcagtgccatgcggggctag

SEQ ID NO: 3393 - protein, 149 aa, Drosophila persimilis
MAATNLTFDQIEEIREAFQVFDRENKGCITCKELGTVMRSLGQNPTEAELYDMIDEIDLDGDGTIDFSEFLYMMSQRMEDLGSEESLLLGFKIFDRDDNGYISTLELKTTMMMLGEKVTDEEVREIMAEIDQDHDGRISYAEFLSAMRG

SEQ ID NO: 3394 - DNA, 456 bp, Drosophila persimilis
  CDS (1)..(456)
atggataccggggaaatcagcctaagtcccgaacaaatcaaggagatccgggaggctttcgccgtttacgacagagacaacaccggcgcgatcacctgccgcgagctgggggtcgttatgcgctccctgggacagacgcccaccgaggccgagctgtacgacatgatcgaggagatcgacgcggacaacaacggcacgattgagttcgtcgagtttctccagatgatgtccaagaactatcaggttctcaacaaggacgagtccgtgagggccgcattcgtggtgttcgatcgcgacgccgatgggtttatatcagcgcaggagatgaaggccgtcatcctcagtctgggggagaaggtgaacgaccaggagttcgacgagatgttccgtgaggtcgatttggacaacgatgggcagctaagcttcgatgagtttctttatgcatatagaaactag

SEQ ID NO: 3395 - protein, 151 aa, Drosophila persimilis
MDTGEISLSPEQIKEIREAFAVYDRDNTGAITCRELGVVMRSLGQTPTEAELYDMIEEIDADNNGTIEFVEFLQMMSKNYQVLNKDESVRAAFVVFDRDADGFISAQEMKAVILSLGEKVNDQEFDEMFREVDLDNDGQLSFDEFLYAYRN

SEQ ID NO: 3396 - DNA, 447 bp, Drosophila persimilis
  CDS (1)..(447)
atggccgaactgactgaggagcagattgcagagttcaaggaggctttcgccctgttcgacaaggatggcagtggctccatcaccacccgcgaattgggcatcctgatgcgctccctgggccaaaaccccaccgaggccgagcttcaggatctggtgaacgaggtcgacatcgatggcaatggcgagatcgatttcaacgagttctgccagatgatgggcaagcagatgcgggacactgacacggaggaggagatgcgcgaggccttcaagatctttgaccgcgaccttgacggcttcatatcgccggcagagctccgttttgtgatgatcaatctgggtgagaaggtcagcgacgaggagattgatgagatgatacgcgaggccgacttcgatggagatggcctgataaactacgaggagttcgtttggatgatcaaccaaaagtag

SEQ ID NO: 3397 - protein, 148 aa, Drosophila persimilis
MAELTEEQIAEFKEAFALFDKDGSGSITTRELGILMRSLGQNPTEAELQDLVNEVDIDGNGEIDFNEFCQMMGKQMRDTDTEEEMREAFKIFDRDLDGFISPAELRFVMINLGEKVSDEEIDEMIREADFDGDGLINYEEFVWMINQK

SEQ ID NO: 3398 - DNA, 444 bp, Drosophila virilis
  CDS (1)..(444)
atggatctgactgactatgagctggaggaatttaagcgagcctttcaaatattggaccgagatggagagggtagcattcaggcaagagaattgggcgtgttcatgcgagatttgggaaaggtgcccacagaaagcgaattgcaggcaatgatcaatcaagtggacttagatggtaacgggagcatcgattttgaagagtttgtcagtgccatgatggcaaaactgaacacaagagcagatgaggatgtgctgcgtgaggcgtttagtgtctatgacaaggagaataccggctatataggagtggatcagctgcgtaccgtaatgatagcgttaaagctgaagcccacagatgaggagcttgacgaactaatacgtgaaggcgacatagatggtgacggctacctcaactacgaagagttcgttcagttgatgaatccccgttag

SEQ ID NO: 3399 - protein, 147 aa, Drosophila virilis
MDLTDYELEEFKRAFQILDRDGEGSIQARELGVFMRDLGKVPTESELQAMINQVDLDGNGSIDFEEFVSAMMAKLNTRADEDVLREAFSVYDKENTGYIGVDQLRTVMIALKLKPTDEELDELIREGDIDGDGYLNYEEFVQLMNPR

SEQ ID NO: 3400 - DNA, 456 bp, Drosophila virilis
  CDS (1)..(456)
atgaatcaacaaccagacctaggtgatgagcaaatcaacgagtacaaggaggccttcgctctcttcgataaaagcggttcgggcatgattagtacacgggagctgggcaatctgatgcgctcactgggccagagtcccaccgaagcggagctcagggatctggtcaatgaggttgataccgttggtaatggagagattgattttgccgcgttttgcacactgatgagcaaacaatcgcacgagaatgattccgacgaggagttacgcgaggcttttaagatctttgacaaggacgaggatggtttcatatcaccggccgagctgcgctttgtcatgatcaatctgggtgagaagctgaccgacgaggagatcgatgatatgatacgtgaggcagactttgacggtgatggcaaaatcaactatgaagaatttgtttatatgattacacaaaagtaa

SEQ ID NO: 3401 - protein, 151 aa, Drosophila virilis
MNQQPDLGDEQINEYKEAFALFDKSGSGMISTRELGNLMRSLGQSPTEAELRDLVNEVDTVGNGEIDFAAFCTLMSKQSHENDSDEELREAFKIFDKDEDGFISPAELRFVMINLGEKLTDEEIDDMIREADFDGDGKINYEEFVYMITQK

SEQ ID NO: 3402 - DNA, 459 bp, Drosophila virilis
  CDS (1)..(459)
atggaggctgttggaggcatcgcattgaccgaggaccaattaaatgaaatacgcgatgcttttagggttttcgatcaaaataacacgggcaaaattacgggaaagcaaatgggtgttgcgatgcgctcgcttggctactgtcccacagaggcggagctgtatgatctgatcgatgagattgatctcgatggtgatggtgagatagactttttggagtttcaacaaatgatagcgaaacgcatggatggcctctccaaggaggagaatctaatggcaatattcaagctgttcgatcgcgatgaggatggcatcatagcgcccatcgagatgcgtaatgttatgttcaatctaggcgaacgatgcactgacgaggagttcaatgatatgatgaaggaaatcgatgccgacaacgatggcaaaatcacctttcaagattttgttaatggcgttaagaactaa

SEQ ID NO: 3403 - protein, 152 aa, Drosophila virilis
MEAVGGIALTEDQLNEIRDAFRVFDQNNTGKITGKQMGVAMRSLGYCPTEAELYDLIDEIDLDGDGEIDFLEFQQMIAKRMDGLSKEENLMAIFKLFDRDEDGIIAPIEMRNVMFNLGERCTDEEFNDMMKEIDADNDGKITFQDFVNGVKN

SEQ ID NO: 3404 - DNA, 447 bp, Drosophila willistoni
  CDS (1)..(447)
atggaggaactacgacccgatgaaatgatttggatcaccgaagcctttcgaatacttcagaaggatagtgagggaagtgtcactacacgtgaattggcaactgtgatgcgttccttgggctgtcatcccagtgagggtgaacttcagtctatgatcaatgaggtggattacgatggtaatggttccattgaaattgaagaattcactgccatgattttgaggaaattgcgtgccaccaacaatgaggatgaactacgtgaagcatttcgtatctatgatagagataacaatggtttcattcacccaggcgaattgaaatacgtattgacggcattgggtgtgaaaattagcgatgaagaagttgatgaaatgattagagaatatgattacgatcatgatggacaaatgaatttcgatgattttgttggcatgatgtcaacgatttaa

SEQ ID NO: 3405 - protein, 148 aa, Drosophila willistoni
MEELRPDEMIWITEAFRILQKDSEGSVTTRELATVMRSLGCHPSEGELQSMINEVDYDGNGSIEIEEFTAMILRKLRATNNEDELREAFRIYDRDNNGFIHPGELKYVLTALGVKISDEEVDEMIREYDYDHDGQMNFDDFVGMMSTI

SEQ ID NO: 3406 - DNA, 444 bp, Drosophila willistoni
  CDS (1)..(444)
atggctgaattaactgaagaacaagttaaagaaatttatgatgctttcaaactttttgatgtggatcacaccggtaatataaccgctgttgagatgggcaatgtaatgcgttctattggccaattgcccaccgaagctgaactctacgacttgattgacacggtcgatctcgatggggatggtgaggttgattttcaagaatttctacacatgatggcaatgcgttttcaaaatctttacgacgacaacattctgatggaggcattcaaggtattcgatcgtgatgaggacggtgttataacacagcccgatttgaaaatcgtaatgaccaatttgggtgaaaaattcacagaacaggaattccaagatatgtttcgagaagtggataccgataataatggggtcatcacttttgaagagttcttggatgctgttaagcattag

SEQ ID NO: 3407 - protein, 147 aa, Drosophila willistoni
MAELTEEQVKEIYDAFKLFDVDHTGNITAVEMGNVMRSIGQLPTEAELYDLIDTVDLDGDGEVDFQEFLHMMAMRFQNLYDDNILMEAFKVFDRDEDGVITQPDLKIVMTNLGEKFTEQEFQDMFREVDTDNNGVITFEEFLDAVKH

SEQ ID NO: 3408 - DNA, 447 bp, Drosophila willistoni
  CDS (1)..(447)
atgagtgagttaaccgaagagcagatagcagagtttaaggaggcgttcgctctgttcgataaggatggcagcggttctataaccactcgtgaattgggcaccctcatgcgttcattgggccagaatcccaccgaagcggagctccaggatctcgtcaatgaggtggatgttgatggcaacggtgagattgatttcaatgaattctgcggcatgatggccaagcagatgcgggaaacggataccgaagaggaaatgcgtgaggcatttaagatctttgacaaggatggcgatggctttatatcaccagcagagttgcgttacgtcatgatcaatctgggtgaaaaggtgaccgatgaggagattgatgaaatgatgcgcgaagctgatgccgatggcgatggcatgattaactacgaagagtttgtttggatgatcagtcaaaagtaa

SEQ ID NO: 3409 - protein, 148 aa, Drosophila willistoni
MSELTEEQIAEFKEAFALFDKDGSGSITTRELGTLMRSLGQNPTEAELQDLVNEVDVDGNGEIDFNEFCGMMAKQMRETDTEEEMREAFKIFDKDGDGFISPAELRYVMINLGEKVTDEEIDEMMREADADGDGMINYEEFVWMISQK

SEQ ID NO: 3410 - DNA, 447 bp, Drosophila simulans
  CDS (1)..(447)
atggaggaattgtctactgaagagcaggacctgatcaagaatatctatagagtattggacaaggataacgaaggtgccatcacatcgaaggaattggcacaggtaatccgagcattaggtcgacagcccaacgaagcggaggttcagtccttgataaacgaggtggactctgatggaaacggatccattgcgaaggaggagttttgcaatgtgattctgcgcaagatgcacgatacaaataaggaggaggagctgcgcgatgcatttcgcgtttttgataaggagaacaatgggtatatctctactaccgagttgagggctgtcttcatggcacttggtgagaaattggaagacgacgagctggaagagatgatacgcgagtacgatttagatcaggataatcacattaatttcgaggagttcaccaacatgatgaccacccgttaa

SEQ ID NO: 3411 - protein, 148 aa, Drosophila simulans
MEELSTEEQDLIKNIYRVLDKDNEGAITSKELAQVIRALGRQPNEAEVQSLINEVDSDGNGSIAKEEFCNVILRKMHDTNKEEELRDAFRVFDKENNGYISTTELRAVFMALGEKLEDDELEEMIREYDLDQDNHINFEEFTNMMTTR

SEQ ID NO: 3412 - DNA, 447 bp, Drosophila simulans
  CDS (1)..(447)
atgagcggcagcttgaccgaggcccagattgaagaaatccgagaagcattcagtctgtatgacaaggaacggtccggatgggtttctgtccaacagctcggcggagtaatgcgggcccttggagagagtctcaccgaggcggagatctacgacctggccaacgagtgtgacgtggacttcggtggacaggtacagttcaaggactttctatacgtgatgagcaagcggctggaggagcagaacagtctggtctgcctaaagcaggccttcaagatcttcgatcgcaacgaagtgaacagctttacgattaacgagatccgaatggtgatgaccaacctgggcgagaagatgtccgaagaggacttgcgcgagttgttccaggacattgatcaggacaaagatggaaagatctccttcaacgactttgttactgccatgcgaagctag

SEQ ID NO: 3413 - protein, 148 aa, Drosophila simulans
MSGSLTEAQIEEIREAFSLYDKERSGWVSVQQLGGVMRALGESLTEAEIYDLANECDVDFGGQVQFKDFLYVMSKRLEEQNSLVCLKQAFKIFDRNEVNSFTINEIRMVMTNLGEKMSEEDLRELFQDIDQDKDGKISFNDFVTAMRS

SEQ ID NO: 3414 - DNA, 447 bp, Drosophila yakuba
  CDS (1)..(447)
atggaggatattacacaagaggagcaactcctgatccttgacaccttccgcattttggacaaggagaacgagggcgctataacatctaaagagatggcggtggtgattcgcgccctgggtcgccagcccaacgacgccgaggttcagtccatgatcaacgaggtcgactcggagggaaacggatccatcgaggctccggagttctgcaacgtgatcctgcgcaagatgcgcgacacgaaccacgaggacgagctgcgcgaagctttcaggatttttgacaaggacaacaacggctacataacctccaccgagttaaaaaatgtgttcactgcgctgggcgtgaagcctagcgacgaagagttggatgaaatggtacgcgagtacgatctggatcaggacaatcacatcaattacgaggagtttgttaacatgatgacaatgcgatag

SEQ ID NO: 3415 - protein, 148 aa, Drosophila yakuba
MEDITQEEQLLILDTFRILDKENEGAITSKEMAVVIRALGRQPNDAEVQSMINEVDSEGNGSIEAPEFCNVILRKMRDTNHEDELREAFRIFDKDNNGYITSTELKNVFTALGVKPSDEELDEMVREYDLDQDNHINYEEFVNMMTMR

SEQ ID NO: 3416 - DNA, 447 bp, Drosophila yakuba
  CDS (1)..(447)
atgtcggaactaacggaggagcagattgccgagttcaaggatgccttcgtgcagttcgacaaggagggaaccggcaagatagccacccgtgagctgggcactttgatgcgcaccctgggccagaatcccacggaggccgagttgcaggacttgattgctgaggccgacaacaacagcaatggccaactggacttcagtgagttctgtggcattatggccaagcagatgcgcgaaacggatactgaggaggaaatgcgtgaggcattcaagatttttgatcgcgatggcgatggctttatatcgccagctgagctacgctttgtgatgatcaatctgggcgaaaaggtcaccgacgaggagatcgacgagatgatacgcgaggcggattttgatggagatggcatgatcaactacgaggagttcgtttggatgataagccagaagtag

SEQ ID NO: 3417 - protein, 148 aa, Drosophila yakuba
MSELTEEQIAEFKDAFVQFDKEGTGKIATRELGTLMRTLGQNPTEAELQDLIAEADNNSNGQLDFSEFCGIMAKQMRETDTEEEMREAFKIFDRDGDGFISPAELRFVMINLGEKVTDEEIDEMIREADFDGDGMINYEEFVWMISQK

SEQ ID NO: 3418 - DNA, 495 bp, Drosophila yakuba
  CDS (1)..(495)
atggattacgacttcctaactccgccgccagaggaacggatcattcgcagccacaatctgaccgaggaacagatcaaggatctgcagattgcctttgccatatttgacgaccaagacaacaaggttattcccataacaaatctcagggcactaatgctaactgtggcccacaatcccagtgatggagaattgcaggacatttatgtcgagatcgatgctgatggaaccggtgagttatatctcagcgattttctatacattatgtcccagagatacgcaaacatgtccaccgaggatgagattatagccgcattcagagtatttgacaaacaaggaaccggtctcatatctgaaacggagtttcgtcacataatgcagaacatgggcgagcaattgacggatgatgagctggaggagatcatccgggatgcaaattcagatctggaaggcaatattgactatgtgcgatttgtcaaaaagatgtccagcacataa

SEQ ID NO: 3419 - protein, 164 aa, Drosophila yakuba
MDYDFLTPPPEERIIRSHNLTEEQIKDLQIAFAIFDDQDNKVIPITNLRALMLTVAHNPSDGELQDIYVEIDADGTGELYLSDFLYIMSQRYANMSTEDEIIAAFRVFDKQGTGLISETEFRHIMQNMGEQLTDDELEEIIRDANSDLEGNIDYVRFVKKMSST

SEQ ID NO: 3420 - DNA, 447 bp, Drosophila simulans
  CDS (1)..(447)
atgtcggaactaacggaggagcagattgccgagttcaaggatgcctttgtccagttcgacaaggagggaaccggcaagatcgccacccgtgagctgggcaccttgatgcgcaccctgggccagaatcccacggaggccgagttgcaggatttgatagctgaggccgagagcaacaacaatggccaactgaacttcaccgagttctgcggcataatggccaagcaaatgcgcgaaactgatactgaggaggaaatgcgtgaggcattcaagatttttgatcgcgatggcgatggctttatatcaccagccgagctacgctttgtgatgatcaatctgggcgaaaaggtcaccgacgaggagatcgatgagatgatccgtgaggctgatttcgatggggatggcatgatcaactacgaggaattcgtttggatgattagccagaagtag

SEQ ID NO: 3421 - protein, 148 aa, Drosophila simulans
MSELTEEQIAEFKDAFVQFDKEGTGKIATRELGTLMRTLGQNPTEAELQDLIAEAESNNNGQLNFTEFCGIMAKQMRETDTEEEMREAFKIFDRDGDGFISPAELRFVMINLGEKVTDEEIDEMIREADFDGDGMINYEEFVWMISQK

SEQ ID NO: 3422 - DNA, 483 bp, Ciona intestinalis
  CDS (1)..(483)
atggacgaaaaccatactcgtctcaaaagacaacgatcgtccatagaccacttggatgtcggcgagttccagcgcatgtttaatttattcgacaaaaatatggacggtgttattgaatcgagcgaaatcgagcagtttatgcggtcactaggttaccatcttaccaaggatgaaatccgggatattatggcgacgtatgacctcaacagttctggcacaattgaaatgaacgagtttgtacctatggtgaaaggcaggctgagatctgagtatttagaggcaatagaactggaaatggcattcaaggtttttgatcgggataacaacgggtttatcagcagagatgagcttcgaaacgttctccgtacgatgacggaaaaccccactgaggaagaactggacgagatgatgcgcgaggcagacacagacggtgatggacaaatcgattatcgagagttcgtagcgatgttaacgcgagattaa

SEQ ID NO: 3423 - protein, 160 aa, Ciona intestinalis
MDENHTRLKRQRSSIDHLDVGEFQRMFNLFDKNMDGVIESSEIEQFMRSLGYHLTKDEIRDIMATYDLNSSGTIEMNEFVPMVKGRLRSEYLEAIELEMAFKVFDRDNNGFISRDELRNVLRTMTENPTEEELDEMMREADTDGDGQIDYREFVAMLTRD

SEQ ID NO: 3424 - DNA, 450 bp, Ciona intestinalis
  CDS (1)..(450)
atggcagaccaactgaacgaagaacagatcgcagaattcaaggaagcgttctcccttttcgacaaggacggcgatggtacaatcacaaccaaggagctgggaaccgtcatgaggtctttgggacaaaacccaactgaagctgagcttcaggacatgatcaatgaagttgatgctgacggcaacggaaccatagattttcccgagtttttgacaatgatggcccgaaaaatgaaggacaccgacagtgaagaggaaattagagaagcatttagggttttcgataaggacggcaatggcttcatctcggcggctgagctgcgtcatgttatgaccaatcttggtgaaaagctaacagacgaagaagttgatgaaatgatcagagaagccgacattgacggcgatggccaagtcaactatgaagagttcgtaacaatgatgacgaataaataa

SEQ ID NO: 3425 - protein, 149 aa, Ciona intestinalis
MADQLNEEQIAEFKEAFSLFDKDGDGTITTKELGTVMRSLGQNPTEAELQDMINEVDADGNGTIDFPEFLTMMARKMKDTDSEEEIREAFRVFDKDGNGFISAAELRHVMTNLGEKLTDEEVDEMIREADIDGDGQVNYEEFVTMMTNK

SEQ ID NO: 3426 - DNA, 456 bp, Ciona intestinalis
  CDS (1)..(456)
atgtccgaccaacttacagaagaacaaatagcggaatacaagaacgcatataagtcgtttgcgaaagatgatgacagcccagtgcttaataaggatttaggaaccctcattcgatcgcttggttacttcccaacggaggctgagatagcttcttatatagaggaggcagatgctgaggggatggggtgggttgatgtggctgagttcctcactataatggctggaaaggtaaaggaaccggtcgataccgaggacacgatcaaggaagctttcagggtgtttgataaagattccaacggtttcatcgcagcggctgaactacggcaagtgatgacgagtataggtgaatcgttaacagaggaagaagttgaagaaatgatcaggagtgccgacatggatggagacggacagattaactatgaagactttgtaactaggatgatggccaaacaatga

SEQ ID NO: 3427 - protein, 151 aa, Ciona intestinalis
MSDQLTEEQIAEYKNAYKSFAKDDDSPVLNKDLGTLIRSLGYFPTEAEIASYIEEADAEGMGWVDVAEFLTIMAGKVKEPVDTEDTIKEAFRVFDKDSNGFIAAAELRQVMTSIGESLTEEEVEEMIRSADMDGDGQINYEDFVTRMMAKQ

SEQ ID NO: 3428 - DNA, 495 bp, Ciona intestinalis
  CDS (1)..(495)
atgtcgatgacagttgaagacgcgagagcaaaattggacaaagagcaaatatctgaattcaagcaagcgttcgacatcttcgatcaagatggcggcggtgacatcagcacgcgggagttggggagggtgatgaaaatgttgggacaaacaccaagtccggaggaacttgctaagattgtagaggaagttgacgttgatggcagcggtacaatcgacttcgatgagttcttgataatgatggttatgcagattagtgaggaagggaagacggcgagcgaggaagaattgaaagatattttcctgctgtttgataagaacggcgacagttacattgattgggacgaattaaaggaagcgttgagcaacacatcggccaaaccagctgtggaaacatgggaggtagacgagttgtttaaggaagcggacaagaacggagatggtgtcattgatattgaagaatggactttatggatggacggcgttcaaggtcactaa

SEQ ID NO: 3429 - protein, 164 aa, Ciona intestinalis
MSMTVEDARAKLDKEQISEFKQAFDIFDQDGGGDISTRELGRVMKMLGQTPSPEELAKIVEEVDVDGSGTIDFDEFLIMMVMQISEEGKTASEEELKDIFLLFDKNGDSYIDWDELKEALSNTSAKPAVETWEVDELFKEADKNGDGVIDIEEWTLWMDGVQGH

SEQ ID NO: 3430 - DNA, 513 bp, Ciona intestinalis
  CDS (1)..(513)
atgtcagcaacgacaaagcctggaactgcaaagcctgagattgcgaagtctgaaaccatcaagcgcactactgattcacaaatggaagaattaagggaagcatttcgattttttgatcgaaaccagaacggcagtattgaacctgaagaattgggatcagtgatgacctcgttgggatattgcgctacagattctgaactaaaagatatgatccacgaggcagatgtggatgggaatgggaagatcgacttcaaggagtttgtccggatgatggaacttaagaccaacgaacgtccagagcaagcagaggacgaagaattaagagaagcattcaaggttttcgaccgggacggtaacggtttaattagtcgtgcggaattaagtcaagtcatgggaaatctgggcgaacagctgagcgaaaaagatctcaatgatatgatttctgaagccgacaaaaacggtgatggtcaaattgactatgaagaattcgtgcaaatggtggcgaagaagtga

SEQ ID NO: 3431 - protein, 170 aa, Ciona intestinalis
MSATTKPGTAKPEIAKSETIKRTTDSQMEELREAFRFFDRNQNGSIEPEELGSVMTSLGYCATDSELKDMIHEADVDGNGKIDFKEFVRMMELKTNERPEQAEDEELREAFKVFDRDGNGLISRAELSQVMGNLGEQLSEKDLNDMISEADKNGDGQIDYEEFVQMVAKK

SEQ ID NO: 3432 - DNA, 447 bp, Drosophila pseudoobscura pseudoobscura
  CDS (1)..(447)
atgaccgaactcactgaggagcagattgcagagttcaaggaggctttcgccctgtttgacaaggatggcactgggtccatcaccacccgcgagttgggcatcctgatgcggtccctgggccagaaccccaccgaggccgagcttcaggatctggtgaacgaggtcgacatcgatggcaatggcgagatcgacttcaacgagttctgccagatgatgaacaagcagaaacgggaatctgacacggaggaggagatgcgagaggctttccagatctttgaccgcgaccacgacggcttcatatcgccggcagagctccgtttcgcgatgatcaacctgggtgagaaggtcactgaggaggagatcgacgatatggtacgcgaggctgacttcgacggggacggcctgataaactacgaggagtttgtttggatgatcaaccagaagtag

SEQ ID NO: 3433 - protein, 148 aa, Drosophila pseudoobscura pseudoobscura
MTELTEEQIAEFKEAFALFDKDGTGSITTRELGILMRSLGQNPTEAELQDLVNEVDIDGNGEIDFNEFCQMMNKQKRESDTEEEMREAFQIFDRDHDGFISPAELRFAMINLGEKVTEEEIDDMVREADFDGDGLINYEEFVWMINQK

SEQ ID NO: 3434 - DNA, 456 bp, Drosophila pseudoobscura pseudoobscura
  CDS (1)..(456)
atggataccggggaaatcagcctaagtcccgaacaaatcaaggagattcgggaggctttcgccgtttacgacagagacaacaccggcgcgatcacctgccgcgagctgggcgtcgttatgcgctccctcggacagacgcccaccgaggccgagctgtacgacatgatcgaggagatcgacgcggacaacaacggcacgattgagttcgtcgagtttctccagatgatgtccaagaactatcaggtgctcaacaaggacgagtccgtgagggccgcgttcgaggtgttcgatcgcgacgccgatgggtttatatcagcgcaggagatgaaggccgtcatcctcagtctgggggagaaggtgaacgaccaggagttcgacgagatgttccgtgaggtcgatttggacaacgatgggcagctaagcttcgatgagtttctttatgcatatagaaactag

SEQ ID NO: 3435 - protein, 151 aa, Drosophila pseudoobscura pseudoobscura
MDTGEISLSPEQIKEIREAFAVYDRDNTGAITCRELGVVMRSLGQTPTEAELYDMIEEIDADNNGTIEFVEFLQMMSKNYQVLNKDESVRAAFEVFDRDADGFISAQEMKAVILSLGEKVNDQEFDEMFREVDLDNDGQLSFDEFLYAYRN

SEQ ID NO: 3436 - DNA, 450 bp, Drosophila pseudoobscura pseudoobscura
  CDS (1)..(450)
atggctgccacaaacctaacattcgatcagatcgaagagattcgcgaggccttccaggtgttcgatcgcgagaacaaaggatgcatcacctgcaaggagctgggaactgtgatgcgttcgctgggccagaaccccaccgaggcggagctgtacgatatgattgacgagatcgatctggacggggatgggacgatcgacttctccgagttcctgtacatgatgtcgcaacggatggaggacctcggcagcgacgagtccctgctgctgggcttcaagatcttcgatcgcgacggcaatggctatataagcaccctcgagctgaagaccaccatgatgatgctgggcgagaaggtgacggacgaggaggtgcgcgaaatcatggccgaaatcgatcaggatcacgatggcaggatcagctacgccgagtttctcagtgccatgcggagctaa

SEQ ID NO: 3437 - protein, 149 aa, Drosophila pseudoobscura pseudoobscura
MAATNLTFDQIEEIREAFQVFDRENKGCITCKELGTVMRSLGQNPTEAELYDMIDEIDLDGDGTIDFSEFLYMMSQRMEDLGSDESLLLGFKIFDRDGNGYISTLELKTTMMMLGEKVTDEEVREIMAEIDQDHDGRISYAEFLSAMRS

SEQ ID NO: 3438 - DNA, 453 bp, Anopheles gambiae str. PEST
  CDS (1)..(453)
atgatgaccgaatccgaacagtccgagatgcaggagcaacagttccggcaaatgtttgaaatgttcgatcgcgacggtagcggttcgatttcgacgaccgagctcggtgatctgatgcgcgtgctgggactaaacccaacgatggccgagctggaacagatggtttacgaagtcgactcggacggcaatgggcgcatcgagtgggaagagtttgtggcactgatgaagaataagtcgcgcgaaccggtcgacgagaaggagctgtacgccgcgtttaaagtgttcgaccgcaacggggacgggtttctgtccgttgacgagctgtccgatgtgatgcaaaactttggcgagcggttgacgcagcgcgagctcgaggacctactggccgaggccgatattgacggtgatgggaggattaactatgaggagttcgtttacatgctgatgaagtga

SEQ ID NO: 3439 - protein, 150 aa, Anopheles gambiae str. PEST
MMTESEQSEMQEQQFRQMFEMFDRDGSGSISTTELGDLMRVLGLNPTMAELEQMVYEVDSDGNGRIEWEEFVALMKNKSREPVDEKELYAAFKVFDRNGDGFLSVDELSDVMQNFGERLTQRELEDLLAEADIDGDGRINYEEFVYMLMK

SEQ ID NO: 3440 - DNA, 444 bp, Magnaporthe grisea 70-15
  CDS (1)..(444)
atggcttctaaccacttcgactctcaggcttccaccaactacaaggaggcgttttcgctgttcgataagcgcggtaacggacgcgttgcgctcgacagcctcggcgacctgctgcgcgcttgcggtcagaacccgaccctgacggagatccgcgacctggagaagaacgtgggaggcgacttcgacttcgagacttttcagcgcgtgctcaacaggccaggcggcttccgtgaccccggtgagcccgaggaatactgccgcggtttccaagtgttcgacaaggacatgaccggtttcattggcgtcgggcagctcaagtacatcctgacgaaccttggcgagaagatgacggatgaggaggttgatgagctgctcaagtctgtcgacaccagctcgggacaggtcaactacaccgagcttgttaggaccattctggccaactag

SEQ ID NO: 3441 - protein, 147 aa, Magnaporthe grisea 70-15
MASNHFDSQASTNYKEAFSLFDKRGNGRVALDSLGDLLRACGQNPTLTEIRDLEKNVGGDFDFETFQRVLNRPGGFRDPGEPEEYCRGFQVFDKDMTGFIGVGQLKYILTNLGEKMTDEEVDELLKSVDTSSGQVNYTELVRTILAN

SEQ ID NO: 3442 - DNA, 444 bp, Gibberella zeae PH-1 (anamorph: Fusarium graminearum)
  CDS (1)..(444)
atgtctaacaacaagtttgaatcgcaggcttctaccaactacaaggaggcttttgccctgttcgacaagcgcggaaacggccgtgtcactgttgacagcctcggtgatcttctgcgcgcctgtggccagaaccctactctttccgagattcaggacctcgagaagaacgttggtggcgaattcgacttcgagacattccagcgcgtcctcaaccgccccggcggtttccgcgaccctggcgagcctgaggaatactgccgcggtttccaagtgtttgataaggatatgacgggtttcatcggcgtcggccagcttaagtacatcttgacaaacctgggcgagaagatgaccgacgaggaggtcgacgagctcctcaaggccgtcgacaccagctcaggccaggtcaactacactgaccttgtgcgaaccatcctcgccaactaa

SEQ ID NO: 3443 - protein, 147 aa, Gibberella zeae PH-1 (anamorph: Fusarium graminearum)
MSNNKFESQASTNYKEAFALFDKRGNGRVTVDSLGDLLRACGQNPTLSEIQDLEKNVGGEFDFETFQRVLNRPGGFRDPGEPEEYCRGFQVFDKDMTGFIGVGQLKYILTNLGEKMTDEEVDELLKAVDTSSGQVNYTDLVRTILAN

SEQ ID NO: 3444 - DNA, 444 bp, Candida glabrata CBS 138
  CDS (1)..(444)
atgtcttctaacttaactgaggaacaaattgctgagtttaaggaagcttttgctttgtttgacaaggataacaatggatccatttcttctagtgaattggccactgttatgagatccttagggctttctccaagtgaagctgaagtcaccgatctaatgaacgaaatcgatgttgatggtaaccaccaaattgaatttagcgagttcttggcactaatgtcacgccaactaaagtctaatgactctgaacaagaactattagaagctttcaaagtctttgacaagaatggtgacggtctaatctctgctgctgaattgaagcatgtgttgacctctattggtgaaaagcttactgacgctgaagtggatgaaatgttgcgtgaagtcagtgatggctctggtgaaattaacatccaacaatttgctgcactattatctaaataa

SEQ ID NO: 3445 - protein, 147 aa, Candida glabrata CBS 138
MSSNLTEEQIAEFKEAFALFDKDNNGSISSSELATVMRSLGLSPSEAEVTDLMNEIDVDGNHQIEFSEFLALMSRQLKSNDSEQELLEAFKVFDKNGDGLISAAELKHVLTSIGEKLTDAEVDEMLREVSDGSGEINIQQFAALLSK

SEQ ID NO: 3446 - DNA, 477 bp, Candida glabrata CBS 138
  CDS (1)..(477)
atgagtgggatcaggatgtcgccagctcgtggaagccaattgacagaagaacaaagacaagagatattcgaggccttttcgctatttgatatgaataatgatgggtacttggactatcatgagttaaaggttgctatgagagctcttgggtttgacctatctaagagagaagtacttgatctgatagataaacacgataatgacaggcggagacagataaaatacgatgatttctttcaagagatgggagaaagaatgctgaaacgggatcctgtagaagaaatcaagagagctttccagctatttgataagaatggggataagaagattactgtgcaggatcttcgagaagtggcccaggaactaggtgaaaacttaacaatggaagaatgccacgcgatgatagatgagttcgatatggatgatgatggagcaattaatgaggaagagttcatatctatttgtatggataattga

SEQ ID NO: 3447 - protein, 158 aa, Candida glabrata CBS 138
MSGIRMSPARGSQLTEEQRQEIFEAFSLFDMNNDGYLDYHELKVAMRALGFDLSKREVLDLIDKHDNDRRRQIKYDDFFQEMGERMLKRDPVEEIKRAFQLFDKNGDKKITVQDLREVAQELGENLTMEECHAMIDEFDMDDDGAINEEEFISICMDN

SEQ ID NO: 3448 - DNA, 504 bp, Kluyveromyces lactis NRRL Y-1140
  CDS (1)..(504)
atgaataacagaaggcccagtggacgagtagcgaaatccgtggataaatccactttacaaaaggaattattagaagaacagaaacaagaaatatacgaggcgttctcactctttgatatgaacaatgatggatatctcgactatcatgaattcaaagtcgctctaagggcattgggttttgaactcagtaaaggagacatattagaacttatcgataggtatgatgcagacggacgccggttaatacaatacgaggatttttacctggtagtaggagaaaaaatattgcaaagagacccattggatgaaattaaacgtgccttcaggctattcgacgatgataacacgggcaagatctcattgaagaatttgaaacgtgtagctcacgaactaggtgaaaaccttacagacgaagaactacgtgccatgattgatgagtttgatcttgacgatgacggagagatcaatgaagaagagttcattgctatatgcactgacaattag

SEQ ID NO: 3449 - protein, 167 aa, Kluyveromyces lactis NRRL Y-1140
MNNRRPSGRVAKSVDKSTLQKELLEEQKQEIYEAFSLFDMNNDGYLDYHEFKVALRALGFELSKGDILELIDRYDADGRRLIQYEDFYLVVGEKILQRDPLDEIKRAFRLFDDDNTGKISLKNLKRVAHELGENLTDEELRAMIDEFDLDDDGEINEEEFIAICTDN

SEQ ID NO: 3450 - DNA, 459 bp, Yarrowia lipolytica CLIB122
  CDS (1)..(459)
atgtctgaccagctgaccgaagaccaggttgccgaattccgagaggctttctccctgtttgacaagaacaatgacggtaaaatcaccaccaaggagcttggtaccgtgatgcgaagtctgggccagaaccccagcgagtccgagctcgccgacatgatcaacgaggtcgacgccaacaacgacggcaccattgacttcgccgagttcctcaccatgatggctcgaaagatgaaggataccgactccgaggaggaaatcagagaggcattcaaggtctttgaccgggataacaacggcttcatctccgcccaggagctccgacacgtcatgacctccattggtgagaagctcaccgatgaggaggttgatatgatgatcaaggaggctgatgccaacggtgatggccgaatcgactacaacgagtttgttcagctgctggtgagttctactattacatga

SEQ ID NO: 3451 - protein, 152 aa, Yarrowia lipolytica CLIB122
MSDQLTEDQVAEFREAFSLFDKNNDGKITTKELGTVMRSLGQNPSESELADMINEVDANNDGTIDFAEFLTMMARKMKDTDSEEEIREAFKVFDRDNNGFISAQELRHVMTSIGEKLTDEEVDMMIKEADANGDGRIDYNEFVQLLVSSTIT

SEQ ID NO: 3452 - DNA, 540 bp, Apis mellifera (honey bee)
  CDS (1)..(540)
atggaaacggagaagaaatacacgaccgcctatgggaaattgcgaagattgacgagcaccatagacggccagattcgacagataagctctgaatatggactcacggaagatcaagtggcggagttcaaggaggcgttcatgctgttcgacaaggacgaggacggcacgatcacgatggcggagctcggcgtggtgatgagatctttagggcaaaggccgtccgagacggaattgcgagatatggtgaacgaggtggatcaggatgggaacggtaccatcgagttcaacgagttcttgcaaatgatgtcgaaaaagatgaagggcgccgacggggaggacgagttgcgcgaggcgttcagagtgttcgacaagaacaaggacgggctgatctcgtcgaaggagttgcgacacgtgatgacgaaccttggggagaaattgtcggaggaggaggtggacgatatgatcaaggaggcggatctggacggcgatggaatggtgaattatgaagaattcgtgacaatcctgacgtcgaagaattag

SEQ ID NO: 3453 - protein, 179 aa, Apis mellifera (honey bee)
METEKKYTTAYGKLRRLTSTIDGQIRQISSEYGLTEDQVAEFKEAFMLFDKDEDGTITMAELGVVMRSLGQRPSETELRDMVNEVDQDGNGTIEFNEFLQMMSKKMKGADGEDELREAFRVFDKNKDGLISSKELRHVMTNLGEKLSEEEVDDMIKEADLDGDGMVNYEEFVTILTSKN

SEQ ID NO: 3454 - DNA, 438 bp, Aspergillus nidulans FGSC A4
  CDS (1)..(438)
ctgaccgaagagcaagtttccgagtacaaggaggccttctccctatttgacaaggatggcgatggccagattaccactaaggagcttggcactgtcatgcgctcgctcggtcagaatccttcagagtctgagcttcaggacatgatcaacgaagttgacgccgacaacaatggcaccattgactttccagagttccttaccatgatggccagaaagatgaaggacaccgattccgaggaggaaattcgggaggcgttcaaggtcttcgaccgtgacaacaatggtttcatctccgctgctgagctgcgtcacgtcatgacctcgatcggtgagaagctcaccgatgacgaagtcgacgagatgatccgcgaggcggaccaggatggcgacggccgaattgactacaacgaattcgtccaacttatgatgcaaaaataa

SEQ ID NO: 3455 - protein, 145 aa, Aspergillus nidulans FGSC A4
MTEEQVSEYKEAFSLFDKDGDGQITTKELGTVMRSLGQNPSESELQDMINEVDADNNGTIDFPEFLTMMARKMKDTDSEEEIREAFKVFDRDNNGFISAAELRHVMTSIGEKLTDDEVDEMIREADQDGDGRIDYNEFVQLMMQK

SEQ ID NO: 3456 - DNA, 519 bp, Candida albicans SC5314
  CDS (1)..(519): transl_table=12
atgaaatgtgttttgtctgtacgattctactatctacaacaatcgtttatactaactatcaactttataaaggctgaaaaattatcagaacaacaaattgctgaattcaaagaagcattttctttattcgataaagatagcgatggcaaaataactaccaaagaattaggtacagttatgagatctttaggccaaaacccatctgaaagtgagttgactgacatgataaatgaagttgatgtcaactctgatggttcaattgatttcccggaatttttgactatgatggcaagaaagatgaaggatacagactcagaggcagaaattgcagaagcattcaaagtatttgacagaaacggtgatgggaaaatcagtgctgccgagttaagacacgttttgacttcaattggtgagaaattgtctgatgctgatgtggatcaaatgattaaagaagctgataccaacaatgatggtgagattgatatccaagaatttactctgttattagcagctaaataa

SEQ ID NO: 3457 - protein, 172 aa, Candida albicans SC5314
MKCVLSVRFYYLQQSFILTINFIKAEKLSEQQIAEFKEAFSLFDKDSDGKITTKELGTVMRSLGQNPSESELTDMINEVDVNSDGSIDFPEFLTMMARKMKDTDSEAEIAEAFKVFDRNGDGKISAAELRHVLTSIGEKLSDADVDQMIKEADTNNDGEIDIQEFTSLLAAK

SEQ ID NO: 3458 - DNA, 555 bp, Ustilago maydis 521
  CDS (1)..(555)
atggtaggtaaactcagaacgtggtcgatacttggattctgcgatggggacggctccgacattgatggccggcgagccgcactgttgatgctgaagcgtttgttgaccttgcctcttccttttgctcctgcacagtctgacgccgaatacaaggaagcatttgccctgttcgacaagaagggaacgggaaccatcgcgcgcgagtcactgggcgatcttttgcgcgcactcggacagaacccaacgcaggccgaagtagccgacctggccaacgcagcgcccaaggacatcgactacgcctctttcctcaacatcctgaaccgaccaaatggattcaaaccagcaggaacacccgaagagttcatccgcggattccaggtgtttgacaaggatggaaacggattcatcggcgcaggagagttgagatacgtgctgacgagcttgggcgagaagttgagcgacgacgaaatggacgaattgctcaagggcgttcaggttcacccggatggtaacattcactatgaatcgtttgttaggcagatcctcagccagtaa

SEQ ID NO: 3459 - protein, 184 aa, Ustilago maydis 521
MVGKLRTWSILGFCDGDGSDIDGRRAALLMLKRLLTLPLPFAPAQSDAEYKEAFALFDKKGTGTIARESLGDLLRALGQNPTQAEVADLANAAPKDIDYASFLNILNRPNGFKPAGTPEEFIRGFQVFDKDGNGFIGAGELRYVLTSLGEKLSDDEMDELLKGVQVHPDGNIHYESFVRQILSQ

SEQ ID NO: 3460 - DNA, 450 bp, Ustilago maydis 521
  CDS (1)..(450)
atggccgaccagcttaccgaagaccagatcgccgagttcaaggaggccttctccctgtttgacaaggacggcgatggcaccatcaccaccaaggagcttggcaccgtcatgcgatcgctcggtcagaaccccaccgaggcagagctgcaggacatggtcaatgaggtggatgccgacggcaacggcactatcgactttcccgaattcctcaccatgatggcacgcaagatgaaagacactgattcggaagaagagatcaaggaggccttcaaggtattcgacaaggatggaaacggctttattagcgccgctgagcttcgacatgtcatgaccaacttgggcgagaagctctcagacaacgaggtcgacgaaatgatccgagaggctgacgtcgatggcgacggccagatcaactacgacgaatttgtcaagatgatgctgagcaagtag

SEQ ID NO: 3461 - protein, 149 aa, Ustilago maydis 521
MADQLTEDQIAEFKEAFSLFDKDGDGTITTKELGTVMRSLGQNPTEAELQDMVNEVDADGNGTIDFPEFLTMMARKMKDTDSEEEIKEAFKVFDKDGNGFISAAELRHVMTNLGEKLSDNEVDEMIREADVDGDGQINYDEFVKMMLSK

SEQ ID NO: 3462 - DNA, 525 bp, Cryptococcus neoformans var. neoformans B-3501A
  CDS (1)..(525)
atgtcgcactacaccaaacccaaatccaggcgtcccgctaccctccctttaccccactcacacgctaccacatccaattcccgctcactgaccgaagaccaacgcggggaaatcaaggaggctttcgaacttttcgacgtggacaaggacggggctatcgattaccatgaattgaaagtcgctatgcgtgctttgggattcgatgtgaagaaaggggaggtcatgaaattgttgaaggaacatgggggggaagatgggttgatggattttttggcgtttgagaggattatgacagaaaagatcctcgctcgaaatccggagcatgagctcagacgagcgtttgaactgtttgacgacgacagaaccggaaaaatctcgctcaagaacctaagaagagtagcacgagagctgggcgagactctcggtgaagaagagctgcaagcaatgatagacgaatttgaccttgatcaggatggggagatcaacttggaagagttcctcgctatcatgctggatggtgaatga

SEQ ID NO: 3463 - protein, 174 aa, Cryptococcus neoformans var. neoformans B-3501A
MSHYTKPKSRRPATLPLPHSHATTSNSRSLTEDQRGEIKEAFELFDVDKDGAIDYHELKVAMRALGFDVKKGEVMKLLKEHGGEDGLMDFLAFERIMTEKILARNPEHELRRAFELFDDDRTGKISLKNLRRVARELGETLGEEELQAMIDEFDLDQDGEINLEEFLAIMLDGE

SEQ ID NO: 3464 - DNA, 450 bp, Cryptococcus neoformans var. neoformans B-3501A
  CDS (1)..(450)
atggctgaacaacttactaaggaacaaattgctgaattcaaagaggctttctctttgttcgataaggacggagatggaactatcactaccaaggagctcggtaccgttatgcgatctctcggccagaaccctactcaagctgagcttgaagacatgatcaacgaggttgatgccgatggaaacaactctatcgattttgccgaattcatgactcttatggctaggaagatgcacgacaccgactccgaggaggagatccgagaagccttcaaggttttcgacaagaacaacgacggtcatatttctgctgccgagttgaagcacgtcatgaccaatcttggtgagaagctcacagacgctgagatcagcgaaatgattcgagaggcagacaaggacggtgacggaatgatcgactacaacgagtttgttactatgatgatcgccaaataa

SEQ ID NO: 3465 - protein, 149 aa, Cryptococcus neoformans var. neoformans B-3501A
MAEQLTKEQIAEFKEAFSLFDKDGDGTITTKELGTVMRSLGQNPTQAELEDMINEVDADGNNSIDFAEFMTLMARKMHDTDSEEEIREAFKVFDKNNDGHISAAELKHVMTNLGEKLTDAEISEMIREADKDGDGMIDYNEFVTMMIAK

SEQ ID NO: 3466 - DNA, 426 bp, Cryptococcus neoformans var. neoformans B-3501A
  CDS (1)..(426)
atgtccggcaacaacgcagaataccgagaagcctttgccctctttgacaagcgaggcaccggccacgtgccccgtgaatcccttggtgaacttttgcggtccttgggtcagaatcctacccaggcagaggttgccgagctcgagaagactgtcggagccactttcagctatgacgaatttttggcggtgttgaacaggccggatggatggaagcctgccggcactgccgacgagtttatcaagggattccaggtctttgacaaagctggaaacgggttcatcggtgccggtgaacttcgctatgtcctcacccagcttggcgagaagatgactgatgaggaagtggacgagctgctcaagggcttccctgtccaagacggccagatcaactaccactctttcgtccgatcaattctctctcaataa

SEQ ID NO: 3467 - protein, 141 aa, Cryptococcus neoformans var. neoformans B-3501A
MSGNNAEYREAFALFDKRGTGHVPRESLGELLRSLGQNPTQAEVAELEKTVGATFSYDEFLAVLNRPDGWKPAGTADEFIKGFQVFDKAGNGFIGAGELRYVLTQLGEKMTDEEVDELLKGFPVQDGQINYHSFVRSILSQ

SEQ ID NO: 3468 - DNA, 450 bp, Strongylocentrotus purpuratus
  CDS (1)..(450)
atggcagaccaacttacagaagagcagattgctgaattcaaggaggctttttctttgtttgacaaggatggtgatggtacaattaccacgaaggagttgggtaccgtcatgagatcacttggtcagaaccctaccgaggctgaactacaggacatgatcaatgaggtcgatgctgatggcaatggaacgatcgacttcccagagttccttacgatgatggcaaggaagatgaaggagactgacagtgaagaggagatcagagaagctttcagggtcttcgacaaggatggtaacggttacatcagtgctgcagagttacgtcacgtgatgacgaaccttggtgagaagctgacagacgaagaggtggatgagatgatcagggaagccgacatcgatggtgatggtcaagttaattatgaagaattcgtcaccatgatgacatcaaagtga

SEQ ID NO: 3469 - protein, 149 aa, Strongylocentrotus purpuratus
MADQLTEEQIAEFKEAFSLFDKDGDGTITTKELGTVMRSLGQNPTEAELQDMINEVDADGNGTIDFPEFLTMMARKMKETDSEEEIREAFRVFDKDGNGYISAAELRHVMTNLGEKLTDEEVDEMIREADIDGDGQVNYEEFVTMMTSK

SEQ ID NO: 3470 - DNA, 468 bp, Strongylocentrotus purpuratus
  CDS (1)..(468)
atgggtgtgacccatcaccatgacgacccctcctgcttgactccaccccatacctcagagtacagggaagcgtttaacagctttgatcgtaataacgatggcgtcatatcagtggatgagtttggtgacgtcatcaggacgttgggtcagaaccctactaaaaaagacattgaggacgctgtcaagagattcgatgaaaacaaaaacggtacaatagaattcaacgagttcatcaagatgattgacctgatccctttcaatgataaggatcaggaacaagaggaactcaggaaagcttttcaattgtttgacaaagatggcaacggttatatcagtgcggctgagctgaagttagccatgactacactaggagaacctttgacagacgacgaagtagcagaaatgatcgccaatgcagacattgatcaggatggaaagattaattacgaagaatatgtatggcattaa

SEQ ID NO: 3471 - protein, 155 aa, Strongylocentrotus purpuratus
MGVTHHHDDPSCLTPPHTSEYREAFNSFDRNNDGVISVDEFGDVIRTLGQNPTKKDIEDAVKRFDENKNGTIEFNEFIKMIDLIPFNDKDQEQEELRKAFQLFDKDGNGYISAAELKLAMTTLGEPLTDDEVAEMIANADIDQDGKINYEEYVWH

SEQ ID NO: 3472 - DNA, 450 bp, Strongylocentrotus purpuratus
  CDS (1)..(450)
atggcttctgaactcacagaggagcaaatcgctgaattcaaagaggctttctccctttttgacaaggatggtgatggcaccatcacaactaaggagttgggtactgtcatgagatcacttggtcagaaccctactgaggctgagcttcaagacatgatcaatgaagtggatgctgatggtaatggcaatatcgactttcccgaattcttgacgatgatggctaagaagatgaaggaaacagacagcgaagaagagatcagagaagctttcagagtcttcgacaaggatggaaacggtttcatcagcgctgccgagctacgtcacgtgatgacaaaccttggtgagaagttgacagacgaggaggtcgatgaaatgatcagggaagccgatgtcgatggtgacggccaggtcaactatgaagagttcgtttcaatgatgaccaaggaataa

SEQ ID NO: 3473 - protein, 149 aa, Strongylocentrotus purpuratus
MASELTEEQIAEFKEAFSLFDKDGDGTITTKELGTVMRSLGQNPTEAELQDMINEVDADGNGNIDFPEFLTMMAKKMKETDSEEEIREAFRVFDKDGNGFISAAELRHVMTNLGEKLTDEEVDEMIREADVDGDGQVNYEEFVSMMTKE

SEQ ID NO: 3474 - DNA, 441 bp, Strongylocentrotus purpuratus
  CDS (1)..(441)
atggttgacaaactaacagacaagcagatggctggtttcaaggaggctttcgctcagtttgataagaatggtgatggtaccatcacatgcgctgagctgggtgaagtgatgaagtcggtcggccagaacgtacccgaagctgagctcaaggaactcatcaagcttgtcgatctcgatggaaatggatccgtgagtttccaagagtttttgactgtgatcgtcaaggcacttcaggacttggagaaggagattcgagctgcattcaagaccatggacaaagatggcagcggttctctgagccatgctgaggtgaagcaggtgtttgcagactttggagagaagctgagtgataaggatgtggatgctctcatcaaggaggctgatacagacaaggatgggacagtcaactatgaagaattcgtggcgatgttgatgaagtag

SEQ ID NO: 3475 - protein, 146 aa, Strongylocentrotus purpuratus
MVDKLTDKQMAGFKEAFAQFDKNGDGTITCAELGEVMKSVGQNVPEAELKELIKLVDLDGNGSVSFQEFLTVIVKALQDLEKEIRAAFKTMDKDGSGSLSHAEVKQVFADFGEKLSDKDVDALIKEADTDKDGTVNYEEFVAMLMK

SEQ ID NO: 3476 - DNA, 741 bp, Tribolium castaneum (red flour beetle)
  CDS (1)..(741)
atgaagacctcgtccttttccttgagagtcatgcgaagggcccgcaataagccggctgacggtcacgtggcccaaaaactgcaagccgggcaacgcacgccgacacacggggccaaaaacggccccccgaagacaccaagcaagccgtcgcagaagaatgcggcccagaaagggcagccgatcaagcaggcgccggccaaggcggcggctgcggctgttaacaaaacggcgaagaagaccaagaaggggaaacatcaccagcacgacctcatcgtgactattaacctgacggaatatggcttatcggaggaccaagtggccgagttcaaggaagccttcatgctctttgacaaagacgaagacggcacgataacaatggcggagctaggggtggtaatgcggtcgctggggcaacgacctacagaaacggaactgcgcgacatggtgaacgaggtggaccaggacggcaacggcaccatcgagttcaacgaattcctgcagatgatgtccaagaagttgaaggacgccgacggggaagaggagctgaaggaggcgtttcgcgtctttgataagaacaacgacgggctgatatcgtccaatgagctgcgtcacgtgatgaccagcctgggggagcgcctctctgaagaggaggtcgacgatatgatcaaagaggcggacttggacggcgacggccaagtcaactacgaagaattcgtcaacattttgacggccaagaactag

SEQ ID NO: 3477 - protein, 246 aa, Tribolium castaneum (red flour beetle)
MKTSSFSLRVMRRARNKPADGHVAQKLQAGQRTPTHGAKNGPPKTPSKPSQKNAAQKGQPIKQAPAKAAAAAVNKTAKKTKKGKHHQHDLIVTINLTEYGLSEDQVAEFKEAFMLFDKDEDGTITMAELGVVMRSLGQRPTETELRDMVNEVDQDGNGTIEFNEFLQMMSKKLKDADGEEELKEAFRVFDKNNDGLISSNELRHVMTSLGERLSEEEVDDMIKEADLDGDGQVNYEEFVNILTAKN

SEQ ID NO: 3478 - DNA, 468 bp, Tribolium castaneum (red flour beetle)
  CDS (1)..(468)
atggcaggctccaaatttgagttgactgaagagcagaagaacgatattaaagaggcgttcgatttgtttgataatgaaggctctgggaagatcgacgccaaagacctgaaggtggcaattagagcgttgggatttgagccaaagaaggaagaaatcaagaaaatgattgctgatattgatacacagggaactggaaaactgtcttttgatgatttcttgcaattgatgaccatgaaaatggccgaaaaggattcgaaagaggagatcatgaaggcgtttcgcttgtttgacgatgacgagaccggaaaaatcagttttaagaacctgaaaagagtggctaaagaactaggagagaatctcacagatgaagaattgcaagaaatgattgatgaagcagacagggatggagatggtgaaatcaatcaggaagaattcttgcgaattatgaagaaaaccagtttgtactaa

SEQ ID NO: 3479 - protein, 155 aa, Tribolium castaneum (red flour beetle)
MAGSKFELTEEQKNDIKEAFDLFDNEGSGKIDAKDLKVAIRALGFEPKKEEIKKMIADIDTQGTGKLSFDDFLQLMTMKMAEKDSKEEIMKAFRLFDDDETGKISFKNLKRVAKELGENLTDEELQEMIDEADRDGDGEINQEEFLRIMKKTSLY

SEQ ID NO: 3480 - DNA, 450 bp, Branchiostoma belcheri tsingtauense
  CDS (1)..(450)
atggcagatcagctgacagaggaacagatcgctgaattcaaggaggccttcagcctcttcgacaaggatggggatggcaccatcaccacaaaagagttgggcacagtgatgaggtcactgggacagaacccaacagaggcagagctgcaggatatgatcaatgaagttgatgcagatggtaatggtacaatcgacttccctgagttcctcacaatgatggcccggaagatgaaggacacagacagtgaggaggagatccgtgaagcattccgcgtgtttgacaaggatggtaacggcttcatcagtgcggcagagttgcgccacgtcatgaccaatcttggagagaagctaacagacgaggaagtggatgagatgatccgggaggcagacatcgatggcgatggccaagtcgactatgaggaattcgtcaccatgatgacgtccaaatga

SEQ ID NO: 3481 - protein, 149 aa, Branchiostoma belcheri tsingtauense
MADQLTEEQIAEFKEAFSLFDKDGDGTITTKELGTVMRSLGQNPTEAELQDMINEVDADGNGTIDFPEFLTMMARKMKDTDSEEEIREAFRVFDKDGNGFISAAELRHVMTNLGEKLTDEEVDEMIREADIDGDGQVDYEEFVTMMTSK

SEQ ID NO: 3482 - DNA, 450 bp, Physcomitrella patens
  CDS (1)..(450)
atggcggacgacttgactgaagagcagattgctgagttcaaggaggcgttcagtttatttgacaaggatggcgatggtagcatcacgaccaaggagctgggaacagtaatgcggtcgctgggtcagaatcccaccgaggcagagttgcaggacatgatcaatgaggttgatgccgatggaaacggcactatcgattttcccgagtttctaaacctcatggcccggaaaatgaaggataccgactctgaggaggagttgaaggaagcgtttaaagtattcgataaggatcagaatggcttcatctctgctgcggagctccggcacgtgatgaccaacctgggggaaaagctgacagacgaagaagtagatgagatgatccgcgacgccgatgtggatggtgacggccaggtcgactacgacgagtttgtgaagatgatgaaggcaaagtag

SEQ ID NO: 3483 - protein, 149 aa, Physcomitrella patens
MADDLTEEQIAEFKEAFSLFDKDGDGSITTKELGTVMRSLGQNPTEAELQDMINEVDADGNGTIDFPEFLNLMARKMKDTDSEEELKEAFKVFDKDQNGFISAAELRHVMTNLGEKLTDEEVDEMIRDADVDGDGQVDYDEFVKMMKAK

SEQ ID NO: 3484 - DNA, 453 bp, Cicer arietinum
  CDS (1)..(453)
atggcacgagatcaactcacagacgatcagatctctgagttcaaggaagccttcagcttgttcgacaaggacggagatggttgcatcacaaccaaggagcttggaactgttatgcggtcattggggcaaaacccaactgaggcagagctccaggacatgattaatgaagtagatgctgatgggaatggtactattgacttccctgagtttcttaacctcatggcaaggaaaatgaaggacactgactctgaggaggagctgaaagaagcgtttcgggtttttgacaaggatcaaaatggtttcatttctgctgctgagcttcgccatgtgatgaccaaccttggtgagaagctcacggatgaagaggttgatgagatgattcgagaagctgatgttgatggtgacggccaaataaactatgaggaattcgttaatttgatgatggccaagtga

SEQ ID NO: 3485 - protein, 150 aa, Cicer arietinum
MARDQLTDDQISEFKEAFSLFDKDGDGCITTKELGTVMRSLGQNPTEAELQDMINEVDADGNGTIDFPEFLNLMARKMKDTDSEEELKEAFRVFDKDQNGFISAAELRHVMTNLGEKLTDEEVDEMIREADVDGDGQINYEEFVNLMMAK

SEQ ID NO: 3486 - DNA, 450 bp, Vitis vinifera
  CDS (1)..(450)
atggcgaatgcactgacagaagaccagattgttcagttccgggaagccttttgtctgattgacaaagactcagatggttcaattacagtggaagaactggcaactgtgatccaatctttggatgggcatccaacacaagaagaagttcaggatatgataagtgaggttgatgctgatggaaataggagtatagactttgctgagttcttgaatattatggcaagaaaaatgaaggaaaatgttgccgaggaaataaaagaggctttcaaagtatttgatcgggatcaagatggatacatatccgccatcgagctgagaaatgtgatgataaatttgggggagagactaacggatgaggaggcagaacaaatgatcagagaggctgatatggatggtgatggtcaagtcagctatgaggagtttgcaaagatgatgatgactttcaattaa

SEQ ID NO: 3487 - protein, 149 aa, Vitis vinifera
MANALTEDQIVQFREAFCLIDKDSDGSITVEELATVIQSLDGHPTQEEVQDMISEVDADGNRSIDFAEFLNIMARKMKENVAEEIKEAFKVFDRDQDGYISAIELRNVMINLGERLTDEEAEQMIREADMDGDGQVSYEEFAKMMMTFN

SEQ ID NO: 3488 - DNA, 450 bp, Vitis vinifera
  CDS (1)..(450)
  misc_feature (327)..(327): r is g or a
atggcagaacagcttacggaagagcagatcgctgagttcaaggaagctttcagcctcttcgacaaggacggcgatggctgcatcacaaccaaagagttggggacagtaatgagatctctgggacagaatcccactgaagctgaactgcaagatatgatcaatgaagttgatgctgatcaaaatggcaccattgatttccctgagttcttgaatttgatggcacgcaaaatgaaggatactgactctgaagaggaactcaaagaagctttcaaggtcttcgacaaagatcaaaatggctttatttctgctgcagagcttcggcatgtratgacaaatctcggtgagaagttgactgatgaagaggtggatgagatgattcgagaagcggatgtagatggtgatgggcaagtgaattatgaggagtttgtgaggatgatgcttgccaagtga

SEQ ID NO: 3489 - protein, 149 aa, Vitis vinifera
MAEQLTEEQIAEFKEAFSLFDKDGDGCITTKELGTVMRSLGQNPTEAELQDMINEVDADQNGTIDFPEFLNLMARKMKDTDSEEELKEAFKVFDKDQNGFISAAELRHVMTNLGEKLTDEEVDEMIREADVDGDGQVNYEEFVRMMLAK

SEQ ID NO: 3490 - DNA, 450 bp, Vitis vinifera
  CDS (1)..(450)
atggcagatgtgctaagcgaggagcagattgtagagttcaaggaagctttttgtctctttgacaaagatggagatggctgcattaccgtagaagaattggcgacggtgattcggtcgttggatcagaatcccaccgaggaagagcttcaggacatgataagagaagtggatgctgatggaaatgggagcatagagttcgcggagttcctcaacttaatggccaagaaagtaaaggaaacagacgcagaagaggagcttaaagaagccttcaaagtttttgacaaggatcaaaatggttacatctcagccactgagttgaggcatgtgatgataaatctaggggaaaagctaactgatgaggaggtggagcagatgatcagagaggccgacttggacggtgatgggcaggttaactacgatgagtttgtgaagatgatgatgaccgcctag

SEQ ID NO: 3491 - protein, 149 aa, Vitis vinifera
MADVLSEEQIVEFKEAFCLFDKDGDGCITVEELATVIRSLDQNPTEEELQDMIREVDADGNGSIEFAEFLNLMAKKVKETDAEEELKEAFKVFDKDQNGYISATELRHVMINLGEKLTDEEVEQMIREADLDGDGQVNYDEFVKMMMTA

SEQ ID NO: 3492 - DNA, 456 bp, Aegiceras corniculatum
  CDS (1)..(456)
atgggaatggcggatcagctaaccgaagatcagatctccgagttcagggaggccttcagcctattcgacaaggacggagatggttgcattaccaccaaagagctgggaactgtgatgaggtcgttggggcaaaacccaactgaggcagagctccaggacatgatcaatgaggtggatgctgatgggaatggcaccatagacttccctgagttcctcaacctcatggcaaagaagatggaggataccgactctgaggaggagctgaaagaggccttccgagtctttgacaaggaccagaatggcttcatctccgctgctgagctccgccatgtcatgaccaaccttggcgagaagctcaccgacgaagaagtcgatgagatgatcagggaggctgatgtggacggcgacggccagatcaactacgaggagtttgtcaaggtcatgatggcgaaatga

SEQ ID NO: 3493 - protein, 151 aa, Aegiceras corniculatum
MGMADQLTEDQISEFREAFSLFDKDGDGCITTKELGTVMRSLGQNPTEAELQDMINEVDADGNGTIDFPEFLNLMAKKMEDTDSEEELKEAFRVFDKDQNGFISAAELRHVMTNLGEKLTDEEVDEMIREADVDGDGQINYEEFVKVMMAK

SEQ ID NO: 3494 - DNA, 447 bp, Triticum aestivum
  CDS (1)..(447)
atggcggatccgctcaccgacgatcagatctccgagttcaaggaagccttcagcttgttcgataaggatggcgatggttgcatcacaacaaaggagcttggaactgtcatgcgttctttgggtcagaatcccactgaggcagagctccaagacatgatcaacgaagtagatgctgatggcaatggcaccattgacttccctgagttcttgaacctcatggccagaaagatgaaggacactgactctgaagaggaactgaaagaggcgttccgagtgttcgacaaggaccagaatgggttcatttctgctgctaagctccgtcacgtgatgaccaaccttggggagaagctcactgacgaagaggttgatgagatgattcgagaggctgacgttgacggtgatggccaaataaattatgaggagtttgtcaaggtcatgatggcctag

SEQ ID NO: 3495 - protein, 148 aa, Triticum aestivum
MADPLTDDQISEFKEAFSLFDKDGDGCITTKELGTVMRSLGQNPTEAELQDMINEVDADGNGTIDFPEFLNLMARKMKDTDSEEELKEAFRVFDKDQNGFISAAKLRHVMTNLGEKLTDEEVDEMIREADVDGDGQINYEEFVKVMMA

SEQ ID NO: 3496 - DNA, 450 bp, Morus nigra
  CDS (1)..(450)
atggcggatcagctcaccgacgaccagatctctgagttcaaggaggccttcagcctattcgacaaggacggcgatggttgcatcacaaccaaggagcttggaactgtcatgcggtctcttgggcagaacccaactgaggcagagcttcaggatatgatcaatgaggttgatgctgatggcaacggcaccattgatttccctgaattccttaatttgatggccagaaaaatgaaggacactgactttgaggaggagctcaaggaagctttccgtgtgtttgacaaggaccagaatggcttcatttttgcagctgagctgcgccatgtcatgacaaatcttggtgagaagctgaccgatgaggaagtggatgagatgatccgtgaggcggatgttgatggagatgggcagatcaactatgaagagtttgtcaaagttatgatggccaagtga

SEQ ID NO: 3497 - protein, 149 aa, Morus nigra
MADQLTDDQISEFKEAFSLFDKDGDGCITTKELGTVMRSLGQNPTEAELQDMINEVDADGNGTIDFPEFLNLMARKMKDTDFEEELKEAFRVFDKDQNGFIFAAELRHVMTNLGEKLTDEEVDEMIREADVDGDGQINYEEFVKVMMAK

SEQ ID NO: 3498 - DNA, 462 bp, Vitis vinifera
  CDS (1)..(462)
atgagaccgaacaacggagatgtcctgactgcagaacagattgctgagtttcaggaagctttctgcctatttgatatggatggtgatggttgcattacccttgacgaattggccaccgtgatgaaatcgttggaacatagcacaactaaagaagaattgcagaccatgatggatgaagttgatgttgatgggaatgggactatagaatttggggagttcttgaatctcatggctagaaaaatgaaggagagtgaagcagaagaggaattgaaagaagctttcaaagtatttgacaaggatcaagatggttacatatcagctaatgaattgaggaatgtgatgttcaacctgggagagaggctgacagatgaagaggctgaacagatgattcgggaggctgatttagatggcgacggacaagttaattacgaggaatttgtgagaatgatgttagctgtttga

SEQ ID NO: 3499 - protein, 153 aa, Vitis vinifera
MRPNNGDVLTAEQIAEFQEAFCLFDMDGDGCITLDELATVMKSLEHSTTKEELQTMMDEVDVDGNGTIEFGEFLNLMARKMKESEAEEELKEAFKVFDKDQDGYISANELRNVMFNLGERLTDEEAEQMIREADLDGDGQVNYEEFVRMMLAV

SEQ ID NO: 3500 - DNA, 450 bp, Thlaspi caerulescens
  CDS (1)..(450)
atggcggatcagctcactgacgatcagatctctgagttcaaggaagccttcagcctattcgacaaggatggtgatggttgcattaccacaaaggagcttggcaccgtgatgcgttccctgggtcaaaacccgacggaagccgagcttcaggacatgatcaacgaggtggatgcagatggtaacggcaccatcgatttcccagagttcttgaacctgatggctaggaaaatgaaggacacggactctgaggaagagctcaaggaagcgttcagagtgtttgacaaagaccagaacggtttcatctcagctgctgagttgagacacgtgatgacgaaccttggggagaagctaagtgacgaagaagtggatgagatgattaaggaagctgatgttgatggtgatggtcagatcaactacgacgagttcgtcaaggttatgatggccaagtga

SEQ ID NO: 3501 - protein, 149 aa, Thlaspi caerulescens
MADQLTDDQISEFKEAFSLFDKDGDGCITTKELGTVMRSLGQNPTEAELQDMINEVDADGNGTIDFPEFLNLMARKMKDTDSEEELKEAFRVFDKDQNGFISAAELRHVMTNLGEKLSDEEVDEMIKEADVDGDGQINYDEFVKVMMAK

SEQ ID NO: 3502 - DNA, 450 bp, Picea sitchensis
  CDS (1)..(450)
atggcggagcagttgaccgaggatcagatcgcggagttcaaggaggctttcagtctgtttgataaggacggtgatggctgcattaccaccaaggaattgggcactgttatgcgctctctgggacagaatccaactgaagctgaactacaggatatgatcagtgaggttgatgctgatggaaatgggacaattgattttccagagttcttgaatctcatggctcgaaagatgaaggatactgactcagaggaagagttgaaggaggccttcaaggtttttgacaaggaccaaaatggtttcatatctgctgctgagctgcgacatgtgatgaccaacttgggggaaaagctaactgacggagaagtggatgagatgatccgtgaggctgatgttgatggagatggtcaagtcaattatgaggagtttgttaggatgatgttggcaaaatga

SEQ ID NO: 3503 - protein, 149 aa, Picea sitchensis
MAEQLTEDQIAEFKEAFSLFDKDGDGCITTKELGTVMRSLGQNPTEAELQDMISEVDADGNGTIDFPEFLNLMARKMKDTDSEEELKEAFKVFDKDQNGFISAAELRHVMTNLGEKLTDGEVDEMIREADVDGDGQVNYEEFVRMMLAK

SEQ ID NO: 3504 - DNA, 450 bp, Picea sitchensis
  CDS (1)..(450)
atggccaatccgttgacagaagaacaaattgcggagttcagagaggctttcagcctgtttgacagagatggagatggtagcataacaaccaaggagctgtcgacagtaattcgttctcttggccagaacccaacagaagcagagatacaagacatgataaacgaagtagatactgatggcaatggaaccatagacttcagggagtttttggatctcatggcacacaaaatcaaggatttggattcagatgaagaattgagagaagcgtttaaagtatttgacaaagaccagaatggctacatttctgctgctgagcttcgacatgtaatgataaacttgggggagaaactgactgaagaagaggttgagctcatgataaaggaagccgacactgatggagatggacaggttaactacgaagagtttgtgaggatgatgatgggagcataa

SEQ ID NO: 3505 - protein, 149 aa, Picea sitchensis
MANPLTEEQIAEFREAFSLFDRDGDGSITTKELSTVIRSLGQNPTEAEIQDMINEVDTDGNGTIDFREFLDLMAHKIKDLDSDEELREAFKVFDKDQNGYISAAELRHVMINLGEKLTEEEVELMIKEADTDGDGQVNYEEFVRMMMGA

SEQ ID NO: 3506 - DNA, 450 bp, Picea sitchensis
  CDS (1)..(450)
atgatggacaaacttacagaggagcagatttccgagttcaaggaggctttcagcttgtttgacaaggatggagacggatgtatcactacaaaggagctagggacagtaatgcgttctttgggtcaaaacccaactgaagcagagcttcaagatatgataaatgaggttgatgcagatggtaatggtaccattgactttgctgaattcctaaatctcatggcacggaaagtgaaggacactgattctgaagaagagcttaaggaagcattccgggttttcgacaaggaccaaaatgggttcatatctgctgctgagttacgtcatgtcatgacaaatttaggggaaaaactcactgatgaagaagttgatgagatgattcgggaggctgatgtggatggtgatggacaaattaactatgaggaatttgtcaaagtaatgatggccaagtga

SEQ ID NO: 3507 - protein, 149 aa, Picea sitchensis
MMDKLTEEQISEFKEAFSLFDKDGDGCITTKELGTVMRSLGQNPTEAELQDMINEVDADGNGTIDFAEFLNLMARKVKDTDSEEELKEAFRVFDKDQNGFISAAELRHVMTNLGEKLTDEEVDEMIREADVDGDGQINYEEFVKVMMAK

SEQ ID NO: 3508 - DNA, 465 bp, Picea sitchensis
  CDS (1)..(465)
atggaagcaagcagaatcgttgagcagctcacagaagagcagatctctgaattcaaggaggcttttagcttatttgacaaggatggggacggatgtatcacaacaaaagagctggggactgtaatgcggtctctaggtcaaaaccctacagaagcagagctccaagatatgataaatgaagttgatgcagatggcaatggtaccattgattttcctgagtttcttaatctgatggcgaggaagatgaaggatactgattctgaagaagagctgaaggaagcattccgtgtttttgacaaggatcaaaatggttttatctctgctgctgagctacgtcatgtcatgacgaaccttggagagaagctcactgatgaggaagttgatgaaatgattcgggaggctgatgtggatggggatggacaaatcaattatgaggaatttgtaaaagttatgatggccaagtga

SEQ ID NO: 3509 - protein, 154 aa, Picea sitchensis
MEASRIVEQLTEEQISEFKEAFSLFDKDGDGCITTKELGTVMRSLGQNPTEAELQDMINEVDADGNGTIDFPEFLNLMARKMKDTDSEEELKEAFRVFDKDQNGFISAAELRHVMTNLGEKLTDEEVDEMIREADVDGDGQINYEEFVKVMMAK

SEQ ID NO: 3510 - DNA, 450 bp, Picea sitchensis
  CDS (1)..(450)
atggcggagcagttgaccgaggatcagatcgcggagttcaaggaggctttcagtctgtttgataaggacggtgatggctgcattaccaccaaggaattgggcactgttatgcgctctctgggacagaatccaactgaagctgaactacaggatatgatcagtgaggttgatgctgatggaaatgggacaattgattttccagagttcttgaatctcatggctcgaaagatgaaggatactgactcagaggaagagttgaaggaggccttcaaggtttttgacaaggaccaaaatggtttcatatctgctgctgagctgcgacatgtgatgaccaacttgggggaaaagctaactgacgaagaagtggatgagatgatccgtgaggctgatgttgatggagatggtcaagtcaattatgaggagtttgttaggatgatgttggcaaaatga

SEQ ID NO: 3511 - protein, 149 aa, Picea sitchensis
MAEQLTEDQIAEFKEAFSLFDKDGDGCITTKELGTVMRSLGQNPTEAELQDMISEVDADGNGTIDFPEFLNLMARKMKDTDSEEELKEAFKVFDKDQNGFISAAELRHVMTNLGEKLTDEEVDEMIREADVDGDGQVNYEEFVRMMLAK

SEQ ID NO: 3512 - DNA, 450 bp, Populus trichocarpa
  CDS (1)..(450)
atgacggagcagctaacagaggaacagatcgcggagttcaaggaggcttttagtctatttgacaaagatggcgatggttgcatcactaccaaagagttggggacagtgatgagatctctgggacgaaaccccactgaagctgaattgcaggacatgatcaatgaagttgatgctgatcaaaatggaactattgatttccctgagtttttgaatctgatggcaaggaaaatgaaggatactgactcagaggaggaactcaaagaagctttcaaggtatttgacaaggatcagaatggctttatctctgctgcagagcttcgacatgtgatgacaaatcttggggagaagctgactgatgaagaagtggaagagatgatcagagaagctgatgtggatggtgatggccaggtgagttacgaggagtttgtgaggatgatgctggccaagtga

SEQ ID NO: 3513 - protein, 149 aa, Populus trichocarpa
MTEQLTEEQIAEFKEAFSLFDKDGDGCITTKELGTVMRSLGRNPTEAELQDMINEVDADQNGTIDFPEFLNLMARKMKDTDSEEELKEAFKVFDKDQNGFISAAELRHVMTNLGEKLTDEEVEEMIREADVDGDGQVSYEEFVRMMLAK

SEQ ID NO: 3514 - DNA, 450 bp, Populus trichocarpa
  CDS (1)..(450)
atgtctgagcagctaacggaggaacagatcgccgagttcaaggaggctttcagtctctttgacaaagatggggatggttgcatcaccaccaaagagttgggaacagtaatgaggtctcttggacagaaccccactgaagctgagttgcaggacatgatcagtgaagttgatgctgatcagaatggcactattgatttccctgagttcttgaacttgatggcaaggaaaatgaaggatactgactctgaggaggaacttaaagaagctttcaaggtattcgacaaggatcagaatggctttatttctgctgcagagctacgacatgtgatgacaaatcttggggagaagttgacagatgaagaagtggaagagatgatcagagaagcagatgtagatggtgatggtcaggtgaattacgaggagtttgtgaggatgatgttggccaagtga

SEQ ID NO: 3515 - protein, 149 aa, Populus trichocarpa
MSEQLTEEQIAEFKEAFSLFDKDGDGCITTKELGTVMRSLGQNPTEAELQDMISEVDADQNGTIDFPEFLNLMARKMKDTDSEEELKEAFKVFDKDQNGFISAAELRHVMTNLGEKLTDEEVEEMIREADVDGDGQVNYEEFVRMMLAK

SEQ ID NO: 3516 - DNA, 447 bp, Actinidia chinensis
  CDS (1)..(447)
atggcggatccgctcaccgacgatcagatctccgaattcaaggaggctttcagcctcttcgacaaggacggcgacggttgtatcactaccaaggagcttggcacagtgatgcggtctttgggacagaacccaacggaagctgagcttcaggacatgatcaatgaggttgatgctgatggaaatgggacaattgatttcccagagttcctcaacttgatggcccggaagatgaaggataccgactctgaggaggaactgaaggaagctttccgggttttcgacaaggaccagaatggcttcatctctgcagccgagctccgccatgttatgactaatcttggtgaaaagctcacagatgaggaagttgacgagatgattcgtgaggctgatgttgatggtgatggacagatcaactatgaggagttcgtcaaggtcatgatggcctag

SEQ ID NO: 3517 - protein, 148 aa, Actinidia chinensis
MADPLTDDQISEFKEAFSLFDKDGDGCITTKELGTVMRSLGQNPTEAELQDMINEVDADGNGTIDFPEFLNLMARKMKDTDSEEELKEAFRVFDKDQNGFISAAELRHVMTNLGEKLTDEEVDEMIREADVDGDGQINYEEFVKVMMA

SEQ ID NO: 3518 - DNA, 447 bp, Actinidia chinensis
  CDS (1)..(447)
atggcggatccgctcaccgacgatcagatctccgaattcaaggaggccttcagcctcttcgacaaggacggcgacggttgtatcactaccaaggagcttggcacagtgatgcggtctttgggacagaacccaacggaagctgagcttcaggacatgatcaatgaggttgatgctgatggaaatgggacaattgatttcccagagttcctcaacttgatggcccggaagatgaaggataccgactctgaggagaaactgaaggaagctttccggattttcgacaaggaccagaatggcttcatctctgcagccgagctccgccatgttatgactaatcttggtgaaaagctcacagatgaggaagttgacgagatgattcgtgaggctgatgttgatggtgatggacagatcaactatgaggagttcgtcaaggtcatgatggcctag

SEQ ID NO: 3519 - protein, 148 aa, Actinidia chinensis
MADPLTDDQISEFKEAFSLFDKDGDGCITTKELGTVMRSLGQNPTEAELQDMINEVDADGNGTIDFPEFLNLMARKMKDTDSEEKLKEAFRIFDKDQNGFISAAELRHVMTNLGEKLTDEEVDEMIREADVDGDGQINYEEFVKVMMA

SEQ ID NO: 3520 - DNA, 447 bp, Actinidia chinensis
  CDS (1)..(447)
atggcggatccgctcaccgacgatcagatctccgaattcaaggaggctttcagcctcttcgacaaggacggcgacggttgtatcactaccaaggagcttggcacagtgatgcggtctttgggacagaacccaacggaagctgagcttcaggacatgatcaatgaggttgatgctgatggaaatgggacaattgatttcccagagttcctcaacttgatggcccggaagatgaaggataccgactctgaggaggaacggaaggaagctttccgggttttcgacaaggaccagaatggcttcatctctgcagccgagctccgccatgttatgactaatcttggtgaaaagctcacagatgaggaagttgacgagatgattcgtgaggctgatgttgatggtgatggacagatcaactatgaggagttcgtcaaggtcatgatggcctag

SEQ ID NO: 3521 - protein, 148 aa, Actinidia chinensis
MADPLTDDQISEFKEAFSLFDKDGDGCITTKELGTVMRSLGQNPTEAELQDMINEVDADGNGTIDFPEFLNLMARKMKDTDSEEERKEAFRVFDKDQNGFISAAELRHVMTNLGEKLTDEEVDEMIREADVDGDGQINYEEFVKVMMA

SEQ ID NO: 3522 - DNA, 447 bp, Actinidia deliciosa var. chlorocarpa
  CDS (1)..(447)
atggcggatccgctcaccgacgatcagatctccgaattcaaggaggctttcagcctcttcgacaaggacggcgacggttgtatcactaccaaggagcttggcacagtgatgcggtctttgggacagaacccaacagaagccgagcttcaggacatgatcaatgaggttgatgctgatggaaatgggacaattgatttcccagagttcctcagcttgatggcccggaagatgaaggatactgactctgaggaggaactgaaggaagctttccgggttttcgacaaggaccagaatggcttcatctctgcagctgagctccgccatgttatgactaatcttggtgaaaagctcacagatgaggaagttgacgagatgattcgtgaggctgatgtggatggtgatggacagatcaactatgaggagttcgtcaaggtcatgatggcctag

SEQ ID NO: 3523 - protein, 148 aa, Actinidia deliciosa var. chlorocarpa
MADPLTDDQISEFKEAFSLFDKDGDGCITTKELGTVMRSLGQNPTEAELQDMINEVDADGNGTIDFPEFLSLMARKMKDTDSEEELKEAFRVFDKDQNGFISAAELRHVMTNLGEKLTDEEVDEMIREADVDGDGQINYEEFVKVMMA

SEQ ID NO: 3524 - DNA, 447 bp, Actinidia sabiifolia
  CDS (1)..(447)
atggcggatccgctcaccgacgatcagatctccgagttcaaggaggctttcagcctcttcgacaaggacggcgacggtcgtatcactaccaaggagcttggcacagtgatgcggtctttgggacagaacccaacagaagccgagcttcaggatatgatcaatgaggttgatgctgacggaaatgggacaattgatttcccagagttcctcaacttgatggcccggaagatgaaggataccgactctgaggaggaactgaaggaagctttccgggttttcgacaaggaccagaatggcttcatctctgcagccgagcaccgccatgttatgactaatcttggtgaaaagctcacagatgaggacattgacgagatgattcgtgcggctgatgtggatggtgatgggcagatcaactatgaggagttcgtcaaggtcatgatggcctag

SEQ ID NO: 3525 - protein, 148 aa, Actinidia sabiifolia
MADPLTDDQISEFKEAFSLFDKDGDGRITTKELGTVMRSLGQNPTEAELQDMINEVDADGNGTIDFPEFLNLMARKMKDTDSEEELKEAFRVFDKDQNGFISAAEHRHVMTNLGEKLTDEDIDEMIRAADVDGDGQINYEEFVKVMMA

SEQ ID NO: 3526 - DNA, 447 bp, Actinidia melliana
  CDS (1)..(447)
atggcggattcgctcaccgacgatcagatctccgaattcaaggaggctttcagcctcttcgacaaggacggcgacggttgtatcactaccaaggagcttggcacagtgatgcggtctttgggacagaacccaacagaagccgagcttcaggacatgatcaatgaggttgatgctgacggaaatgggacaattgatttcccagagttcctcaacttgatggcccggaagatgaaggataccgactctgaggaggaactgaaggaagctttccgggttttcgacaaggaccagaatggcttcatctctgcagccgagctccgccatgttatgactaatcttggtgaaaagctcacagatgaggaagttgacgagatgattcgcgaggctgacgtggatggtgatggacagatcaactatgaggagttcgtcaaggtcatgatggcctag

SEQ ID NO: 3527 - protein, 148 aa, Actinidia melliana
MADSLTDDQISEFKEAFSLFDKDGDGCITTKELGTVMRSLGQNPTEAELQDMINEVDADGNGTIDFPEFLNLMARKMKDTDSEEELKEAFRVFDKDQNGFISAAELRHVMTNLGEKLTDEEVDEMIREADVDGDGQINYEEFVKVMMA

SEQ ID NO: 3528 - DNA, 447 bp, Actinidia kolomikta
  CDS (1)..(447)
atggcggatccgctcaccgacgatcagatctccgaattcaaggaggctttcagcctcttcgacaaggacggcgacggttgtatcactaccaaggagcttggcacagtgatgcgatctttgggacagaacccaacagaagccgagcttcaggacatgatcaatgaggttgatgctgatggaaatgggacaattgatttcccagagttcctcaacttgatggcccggaagatgaaggataccgactctgaggaggtgctgaaggaagctttccgggttttcgacaaggaccagaatggcttcatctctgcagccgagctccgccatgttatgacaaatctcggtgaaaagctcacagatgaggaagttgacgagatgattcgtgaggctgatgtggatggcgatggtcagatcaactatgaggagttcgtcaaggtcatgatggcctag

SEQ ID NO: 3529 - protein, 148 aa, Actinidia kolomikta
MADPLTDDQISEFKEAFSLFDKDGDGCITTKELGTVMRSLGQNPTEAELQDMINEVDADGNGTIDFPEFLNLMARKMKDTDSEEVLKEAFRVFDKDQNGFISAAELRHVMTNLGEKLTDEEVDEMIREADVDGDGQINYEEFVKVMMA

SEQ ID NO: 3530 - DNA, 447 bp, Actinidia sabiifolia
  CDS (1)..(447)
atggcggatccgctcaccgacgatcagatctccgaattcaaggaggctttcagcctattcgacaaggacggcgatggttgcatcactaccaaggagcttggcacagtgatgcggtctttgggacagaacccaacagaagccgagcttcaggacatgatcaatgaggtcgatgctgatggaaatgggacaattgatttcccagagttcctcaacttgatggcccggaagatgaaggataccgactctgacgaggagttgaaggaagctttccgggttttcgacaaggaccagaatggcttcatctctgcagctgagctccgccatgttatgacaaatcttggtgaaaagctcacagatgaggaagttgacgagatgattcgtgaggctgatgtggatgttgccgggcagatcaactacgaggagttggtcacggtcatgatggcctag

SEQ ID NO: 3531 - protein, 148 aa, Actinidia sabiifolia
MADPLTDDQISEFKEAFSLFDKDGDGCITTKELGTVMRSLGQNPTEAELQDMINEVDADGNGTIDFPEFLNLMARKMKDTDSDEELKEAFRVFDKDQNGFISAAELRHVMTNLGEKLTDEEVDEMIREADVDVAGQINYEELVTVMMA

SEQ ID NO: 3532 - DNA, 447 bp, Actinidia sabiifolia
  CDS (1)..(447)
atggccgatccgctcaccgacgatcagatctccgaattcaaggaggctttcagcctattcgacaaggacggcgatggttgcatcactaccaaggagcttggcacagtgatgcggtctttgggacagaacccaacagaagccgagcttcaggacatgatcaatgaggtcgatgctgatggaaatgggacaattgatttcccagagttcctcaacttgatggcccggaagatgaaggataccgactctgacgaggagttgaaggaagctttccgggttttcgacaaggaccagaacggcttcatctctgcagctgagctccgccatgttatgacaaatcttggcgaaaagctcacagatgaggaagttgacgagatgattcgtgaggctagtgtggatggtgatggacagatcaactacgaggagttggtcacggtcatgatggcctag

SEQ ID NO: 3533 - protein, 148 aa, Actinidia sabiifolia
MADPLTDDQISEFKEAFSLFDKDGDGCITTKELGTVMRSLGQNPTEAELQDMINEVDADGNGTIDFPEFLNLMARKMKDTDSDEELKEAFRVFDKDQNGFISAAELRHVMTNLGEKLTDEEVDEMIREASVDGDGQINYEELVTVMMA

SEQ ID NO: 3534 - DNA, 447 bp, Actinidia deliciosa var. chlorocarpa
  CDS (1)..(447)
atggcggatccgctcaccgacgatcagatctccgaattcaaggaggctttcagcctattcgacaaggacggcgatggttgcatcactaccaaggagcttggcacagtgatgcggtctttgggacagaacccaacagaggccgagctgcaggacatgatcaatgaggtcgatgctgatggaaatgggacaattgatttcccagagttcctcaacttgatggcccttaagatgaaggataccgactctgatgaggagctgaaggaagctttccgggtcttcgacaaggaccagaatggcttcatctctgcagctgagctccgccatgttatgacaaatcttggcgaaaagcttacagatgaggaagtcgacgagatgattcgtgaggctgatgtggatggtgatggacagatcaactacgaggagttcgtcaaggtcatgatggcctag

SEQ ID NO: 3535 - protein, 148 aa, Actinidia deliciosa var. chlorocarpa
MADPLTDDQISEFKEAFSLFDKDGDGCITTKELGTVMRSLGQNPTEAELQDMINEVDADGNGTIDFPEFLNLMALKMKDTDSDEELKEAFRVFDKDQNGFISAAELRHVMTNLGEKLTDEEVDEMIREADVDGDGQINYEEFVKVMMA

SEQ ID NO: 3536 - DNA, 447 bp, Actinidia melliana
  CDS (1)..(447)
atggcggatccgctcaccgacgatcagatctccgaattcaaggaggctttcagcctattcgacaaggacggcgatggttgcatcactaccaaggagcttggcacagtgatgcggtctttgggacagaacccaaccgaagccgagcttcaggacatgatcaatgaggtcgatgctgatggaaatgggacaattgatttcccagagttcctcaacttgatggctcggaagatgaaggataccgactctgatgaggagctgaaggaagctttccgggttttcgacaaggaccagaatggcttcatctctgcagctgagctccgccatgttatgacaaatcttggtgaaaagctcacagatgaggaagttgacgagatgattcgtgaggctgatgtggatggtgatggacagatcaactacgaggagttcgtcaaggtcatgatggcctag

SEQ ID NO: 3537 - protein, 148 aa, Actinidia melliana
MADPLTDDQISEFKEAFSLFDKDGDGCITTKELGTVMRSLGQNPTEAELQDMINEVDADGNGTIDFPEFLNLMARKMKDTDSDEELKEAFRVFDKDQNGFISAAELRHVMTNLGEKLTDEEVDEMIREADVDGDGQINYEEFVKVMMA

SEQ ID NO: 3538 - DNA, 447 bp, Actinidia kolomikta
  CDS (1)..(447)
atggcggatccgctcaccgacgatcagatctccgaattcaaggaggctttcagcctattcgacaaggacggcgatggttgcatcactaccaaggagcttggcacagtgatgcggtctttgggacagaacccaacagaagccgaacttcaggacatgatcaatgaggtcgatgcagatggaaatgggacaattgatttcccagagttcctcaacttgatggcccggaagatgaaggataccgactctgacgaggagctgaaggaagctttccgggttttcgacaaggaccagaatggcttcatctctgcagctgagctccgccatgttatgacaaatcttggtgaaaagctcacagatgaggaagttgacgagatgattcgtgaggctgatgtggatggtgatggacagatcaactacgaggagttcgtcaaggtcatgagggcctag

SEQ ID NO: 3539 - protein, 148 aa, Actinidia kolomikta
MADPLTDDQISEFKEAFSLFDKDGDGCITTKELGTVMRSLGQNPTEAELQDMINEVDADGNGTIDFPEFLNLMARKMKDTDSDEELKEAFRVFDKDQNGFISAAELRHVMTNLGEKLTDEEVDEMIREADVDGDGQINYEEFVKVMRA

SEQ ID NO: 3540 - DNA, 447 bp, Actinidia sabiifolia
  CDS (1)..(447)
atggcggatccgctcaccgacgatcagatctccgaattcaaggaggctttcagcctattcgacaaggacggcgatggttgcatcactaccaaggagcttggcacagtgatgcgatctttgggacagaacccaacagaagccgagcttcaggacatgatcaatgaggtcgatgctgatggaaatgggacaattgatttcccagagttcctcaacttgatggctcggaagatgaaggataccgactctgacgaggagctgaaggaagctttccgggttttcgacaaggaccagaatggcttcatccctgcagctgagctccgccatgttatgacaaatcttggtgaaaagctcacagatgaggaagttgacgagatgattcgcgaggctgatgtggatggtgatggccagatcaactatgaggagttcgtcaaggtcatgatggcctag

SEQ ID NO: 3541 - protein, 148 aa, Actinidia sabiifolia
MADPLTDDQISEFKEAFSLFDKDGDGCITTKELGTVMRSLGQNPTEAELQDMINEVDADGNGTIDFPEFLNLMARKMKDTDSDEELKEAFRVFDKDQNGFIPAAELRHVMTNLGEKLTDEEVDEMIREADVDGDGQINYEEFVKVMMA

SEQ ID NO: 3542 - DNA, 447 bp, Actinidia deliciosa var. chlorocarpa
  CDS (1)..(447)
atggcggatccgctcaccgacgatcagatctctgaattcaaggaggctttcagcctattcgacaaggatggcgatggatgtatcactaccaaggagcttggcacagtgatgcggtctttgggacagaacccaacagaagccgagcttcaggatatgatcaatgaggttgatgctgatggaaatgggacaattgatttcccagagttcctcaacttgatggcccggaagatgagggataccgactctgaggaggagctgaaggaagctttccgggttttcgacaaggaccagaatggcttcatatctgcagctgagctccgccatgttatgacaaatctcggtgaaaagctcacagatgaggaagttgacgagatgattcgtgaggctgatgtggatggcgatggtcagatcaggtacgaggagttcgtcaaggtcatgatggcctag

SEQ ID NO: 3543 - protein, 148 aa, Actinidia deliciosa var. chlorocarpa
MADPLTDDQISEFKEAFSLFDKDGDGCITTKELGTVMRSLGQNPTEAELQDMINEVDADGNGTIDFPEFLNLMARKMRDTDSEEELKEAFRVFDKDQNGFISAAELRHVMTNLGEKLTDEEVDEMIREADVDGDGQIRYEEFVKVMMA

SEQ ID NO: 3544 - DNA, 447 bp, Actinidia valvata
  CDS (1)..(447)
atggcggatccgctcaccgacgatcagatctctgaattcaaggaggctttcagcctattcgacaaggatggcgatggttgtatcactaccaaggagcttggcacagtgatgcggtctttgggacagaacccaacagaagccgagctgcaggacatgatcaatgaggttgatgctgatggaaatgggacaattgatttcccagagttcctcaacttgatggcccggaagatgaaggataccgactctgaggaggagctgaaggaagctctccgggttttcgacaaggatcagaatggcttcatctctgcagccgagctccgccatgttatgacaaatctcggtgaaaagctcacagatgaggaagttgacgagatgattcgtgaggctgatgtggatggcgatggtcagatcaactacgaggagtttgtcaaggtcatgatggcctag

SEQ ID NO: 3545 - protein, 148 aa, Actinidia valvata
MADPLTDDQISEFKEAFSLFDKDGDGCITTKELGTVMRSLGQNPTEAELQDMINEVDADGNGTIDFPEFLNLMARKMKDTDSEEELKEALRVFDKDQNGFISAAELRHVMTNLGEKLTDEEVDEMIREADVDGDGQINYEEFVKVMMA

SEQ ID NO: 3546 - DNA, 447 bp, Actinidia melliana
  CDS (1)..(447)
atggcggattcgctcaccgacgatcagatctccgaattcaaggaggctttcagcctattcgacaaggatggcgatggttgtatcactaccaaggagcttggcacagtgatgcggtctttgggacagaacccaacagaagccgagcttcaggacatgatcaatggggttgatgctgatggaaatgggacaattgatttcccagagttcctcaacttgatggcccggaagatgaaggatactgactctgaggaggagctgaaggaagcttttcgggttttcgacaaggaccagaatggcttcatctctgcagctgagctccgtcatgttatgacaaatcttggtgaaaagctcacagatgaggaagttgacgagatgattcgtgaggctgatgtggatggtgatggccagatcaactacgaggagttcgtcaaggtcatgatggcctag

SEQ ID NO: 3547 - protein, 148 aa, Actinidia melliana
MADSLTDDQISEFKEAFSLFDKDGDGCITTKELGTVMRSLGQNPTEAELQDMINGVDADGNGTIDFPEFLNLMARKMKDTDSEEELKEAFRVFDKDQNGFISAAELRHVMTNLGEKLTDEEVDEMIREADVDGDGQINYEEFVKVMMA

SEQ ID NO: 3548 - DNA, 447 bp, Actinidia arguta
  CDS (1)..(447)
atggcggatccgctcaccgacgatcagatctccgaattcaaggaggctttcagcctcttcgacaaggacggcgacggttgtatcactaccaaggagcttggtacagtgatgcggtctttgggacaaaacccaacagaagccgagcttcaggacatgattaatgaggtcgatgctgatggaaatgggacaattgatttcccagagttccttaacttgatggcccggaagatgaaggatactgactctgaggaggagctgaaggaagctttccgggttttcgacaaggaccagaacggcttcttctctgcagctgagttctgccgtgttatgacaaatcttggtgaaaagttcacaaatgaggaagttgacgatatgattcgtgaggctgatgtggatggtgatgggaagatcagctatgaggattttgtcaaggtcatgatggcctag

SEQ ID NO: 3549 - protein, 148 aa, Actinidia arguta
MADPLTDDQISEFKEAFSLFDKDGDGCITTKELGTVMRSLGQNPTEAELQDMINEVDADGNGTIDFPEFLNLMARKMKDTDSEEELKEAFRVFDKDQNGFFSAAEFCRVMTNLGEKFTNEEVDDMIREADVDGDGKISYEDFVKVMMA

SEQ ID NO: 3550 - DNA, 447 bp, Actinidia polygama
  CDS (1)..(447)
atggcggattcgctcaccgacgatcagatcgccgaattcaaggaggctttcagcctcttcgacaaggacggcgacggttgtatcactaccaaggagcttggcacagtgatgcggtctttgggacaaaacccaacagaagccgagcttcaggacatgattaatgaggtcgatgctgatggaaatgggacaattgatttcccagagttcctcaacttgatggcccggaagatgaaggataccgactctgaggaggagctgaaggaagctttccgggttttcgacaaggaccagaatggcttcatctctgcagctgaactccgccatgttatgacaaatcttggtgaaaagctaacagatgaggaagttgacgagatgattcgtgaggctgacgtggatggtgatggacagatcaactacgaggagttcgtcaaggtcatgatggcctag

SEQ ID NO: 3551 - protein, 148 aa, Actinidia polygama
MADSLTDDQIAEFKEAFSLFDKDGDGCITTKELGTVMRSLGQNPTEAELQDMINEVDADGNGTIDFPEFLNLMARKMKDTDSEEELKEAFRVFDKDQNGFISAAELRHVMTNLGEKLTDEEVDEMIREADVDGDGQINYEEFVKVMMA

SEQ ID NO: 3552 - DNA, 447 bp, Actinidia deliciosa var. chlorocarpa
  CDS (1)..(447)
atggcggatccgctcaccgacgatcagatctccgaattcaaggaggctttcagcctcttcgacaaggacggcgacggttgtatcactaccaaggagcttggcacagtgatgcggtctttgggacaaaacccaacagaagccgagcttcaggacatgattaatgaggtcgatgctgatggaagtggggcaattgatttcccagagttcctcaacttgatggcccggaagatgaaggataccgactctgaggaggagctgaaggaagctttccgggtttttgacaaggaccagaatggcttcatctctgcagctgaactccgtcatgttatgacaaatcttggtgaaaagctcacagatgaggaagttgacgagatgattcgtgaggctgatgtggatggtgatgggcagatcaactacgaggagttcgtcaaggtcatgatggcctag

SEQ ID NO: 3553 - protein, 148 aa, Actinidia deliciosa var. chlorocarpa
MADPLTDDQISEFKEAFSLFDKDGDGCITTKELGTVMRSLGQNPTEAELQDMINEVDADGSGAIDFPEFLNLMARKMKDTDSEEELKEAFRVFDKDQNGFISAAELRHVMTNLGEKLTDEEVDEMIREADVDGDGQINYEEFVKVMMA

SEQ ID NO: 3554 - DNA, 447 bp, Actinidia eriantha
  CDS (1)..(447)
atggcggatccgctcaccgacgatcagatctccgaattcaaggaggctttcagcctcttcgacaaggacggagacggttgtatcactacaaaggagcttggcacagtgatgcggtctttgggacaaaacccaacagaagccgagcttcaggacatgattaatgaggtcgatgctgatggaaatgggacaattgatttcccagagttcctcaacttgatggcccggaagatgaaggataccgactctgaggaggagctgaaggaagctttccgggtttttgacaaggaccagaatggcttcatctctgcagctgaaccccgtcatgttatgacaaatcttggtgaaaagctcacagatgaggaagttgacgagatgattcgtgaggctgatgtggatggtgatgggcagatcaactacgaggagttcgtcaaggtcatgatggcctag

SEQ ID NO: 3555 - protein, 148 aa, Actinidia eriantha
MADPLTDDQISEFKEAFSLFDKDGDGCITTKELGTVMRSLGQNPTEAELQDMINEVDADGNGTIDFPEFLNLMARKMKDTDSEEELKEAFRVFDKDQNGFISAAEPRHVMTNLGEKLTDEEVDEMIREADVDGDGQINYEEFVKVMMA

SEQ ID NO: 3556 - DNA, 447 bp, Actinidia eriantha
  CDS (1)..(447)
atggcggatccgctcaccgacgatcagatctccgaattcaaggaggctttcagcctcttcgacaaggacggagacggttgtatcactaccaaggagcttggcacagtgatgcggtctttgggacaaaacccaacagaagccgagcttcaggacatgattagtgaggtcgatgctgatggaaatgggacaattgatttcccagagttcctcaacttgatggcccggaagatgaaggataccgactctgaggaggagctgaaggaagctttccgggttttcgacaaggaccagaatggcttcatctctgcagctgagctccgtcatgttatgacaaatcttggtgaaaagctcacagatgaggaagttgacgagatgattcgtgaggctgatgtggatggtgatgggcagatcaactatgaggagttcgtcaaggtcatgatggcctag

SEQ ID NO: 3557 - protein, 148 aa, Actinidia eriantha
MADPLTDDQISEFKEAFSLFDKDGDGCITTKELGTVMRSLGQNPTEAELQDMISEVDADGNGTIDFPEFLNLMARKMKDTDSEEELKEAFRVFDKDQNGFISAAELRHVMTNLGEKLTDEEVDEMIREADVDGDGQINYEEFVKVMMA

SEQ ID NO: 3558 - DNA, 447 bp, Actinidia kolomikta
  CDS (1)..(447)
atggcggatccgctcaccgacgatcagatctccgaattcaaggaggctttcagcctcttcgacaaggacggcgacggttgtatcactaccaaggagcttggcacagtgatgcgctctttgggacaaaacccaacagaagccgagcttcaggacatgattaatgaggtcgatgctgatggaaatgggacaattgatttcccagagttcctcaacttgatggcccggaagatgaaggataccgactctgacgaggagctgaaggaagctttccgggttttcgacaaggaccagaatggcttcatctctgcagctgaactccgccatgttatgacaaatcttggtgaaaagctcacagatgaggaagttgacgagatgattcgtgaggctgatgtagatggtgatggccagatcaactatgagaagtttgtcaaggtcatgatggcctag

SEQ ID NO: 3559 - protein, 148 aa, Actinidia kolomikta
MADPLTDDQISEFKEAFSLFDKDGDGCITTKELGTVMRSLGQNPTEAELQDMINEVDADGNGTIDFPEFLNLMARKMKDTDSDEELKEAFRVFDKDQNGFISAAELRHVMTNLGEKLTDEEVDEMIREADVDGDGQINYEKFVKVMMA

SEQ ID NO: 3560 - DNA, 450 bp, Stachybotrys elegans
  CDS (1)..(450)
atggctgattcccttaccgaagagcaggtctctgagttcaaggaggccttctccctctttgacaaggatggtgatggtcagatcactactaaggaactgggcaccgtcatgcgctccctgggccagaacccctctgaatccgagcttcaggatatgatcaatgaggtcgacgccgacaacaatggcactattgacttcccagagttcctgaccatgatggcccgaaagatgaaggacaccgactcggaggaggagatccgagaagctttcaaggtcttcgatcgcgacaacaacggtttcatctctgccgctgagctgcgccacgtcatgacctctatcggcgagaagctcaccgaggacgaggtcgatgagatgatccgtgaggctgaccaggacggcgatggccgtatcgactacaacgagttcgtccagctcatgatgcagaagtag

SEQ ID NO: 3561 - protein, 149 aa, Stachybotrys elegans
MADSLTEEQVSEFKEAFSLFDKDGDGQITTKELGTVMRSLGQNPSESELQDMINEVDADNNGTIDFPEFLTMMARKMKDTDSEEEIREAFKVFDRDNNGFISAAELRHVMTSIGEKLTEDEVDEMIREADQDGDGRIDYNEFVQLMMQK

SEQ ID NO: 3562 - DNA, 450 bp, Beta vulgaris
  CDS (1)..(450)
atggccgatcaactcagcgacgatcagatctctgaatttaaggaagccttcagcctatttgacaaagatggagatggctgtatcaccaccaaggaacttggaacagtgatgcgttcgcttggacaaaacccaactgaagcagagctccaggacatgataaatgaagtcgatgctgatggaaatggaacaatcgacttccccgaattcctcaatctgatggcgaggaagatgaaggacaccgactcagaggaggagctgaaggaagctttccgagtttttgacaaggatcaaaatggttttatttctgcagccgagcttcgccacgtgatgacgaaccttggtgaaaagctgacagatgaagaagttgacgagatgatccgtgaggctgatgtggatggtgatggtcagatcaactatgaggaattcgtcaaggttatgatggccaagtga

SEQ ID NO: 3563 - protein, 149 aa, Beta vulgaris
MADQLSDDQISEFKEAFSLFDKDGDGCITTKELGTVMRSLGQNPTEAELQDMINEVDADGNGTIDFPEFLNLMARKMKDTDSEEELKEAFRVFDKDQNGFISAAELRHVMTNLGEKLTDEEVDEMIREADVDGDGQINYEEFVKVMMAK

SEQ ID NO: 3564 - DNA, 450 bp, Zea mays
  CDS (1)..(450)
atggcggaccagctcactgacgaccaaatcgccgagttcaaggaggccttcagcctcttcgataaggacggcgacggttgcatcacaaccaaggagcttggaactgtcatgcgttcactgggtcagaacccaacggaggctgaactccaggacatgatcaatgaggtggatgccgacggcaatggcacgatcgacttccccgagttcctcaacctcatggcccgcaagatgaaggacaccgactccgaggaggagctcaaggaggcgttcagggtgttcgacaaggaccagaacggcttcatctctgccgcggagctccgccacgtgatgaccaacctaggcgagaagctgaccgacgaggaggtcgacgagatgatccgcgaggccgacgttgatggcgatggccggatcaactacgaggagttcgtcaaggtcatgatggccaagtga

SEQ ID NO: 3565 - protein, 149 aa, Zea mays
MADQLTDDQIAEFKEAFSLFDKDGDGCITTKELGTVMRSLGQNPTEAELQDMINEVDADGNGTIDFPEFLNLMARKMKDTDSEEELKEAFRVFDKDQNGFISAAELRHVMTNLGEKLTDEEVDEMIREADVDGDGRINYEEFVKVMMAK

SEQ ID NO: 3566 - DNA, 450 bp, Ipomoea batatas
  CDS (1)..(450)
atggcggataagttgacggacgatcagatttccgagttcaaggaggccttcagcctattcgacaaggacggcgatggttgcatcactaccaaagagcttgggactgtgatgaggtcattgggacagaatcccaccgaagctgagctacaggatatgataaatgaagtggatgctgatggcaatggaaccatcgacttcccagagtttctaaatctcatggccaggaagatgaaggacactgattctgaagaggaactgaaagaggcttttagagtttttgacaaggaccagaacggtttcatctctgctgctgagcttcgccatgtgatgacaaacctcggcgagaagctcactgacgaggaggtggatgagatgataagggaggccgatgttgatggcgatggccaaatcaactacgaggagttcgttaaggttatgatggccaagtga

SEQ ID NO: 3567 - protein, 149 aa, Ipomoea batatas
MADKLTDDQISEFKEAFSLFDKDGDGCITTKELGTVMRSLGQNPTEAELQDMINEVDADGNGTIDFPEFLNLMARKMKDTDSEEELKEAFRVFDKDQNGFISAAELRHVMTNLGEKLTDEEVDEMIREADVDGDGQINYEEFVKVMMAK

SEQ ID NO: 3568 - DNA, 453 bp, Apium graveolens
  CDS (1)..(453)
atggccgaccaacttaccgacgatcaaatctccgagttcaaggaagctttcagcctgtttgataaagacggcgatggttgcatcactaccaaggagcttgggactgtcatgaggtcgctaggacagaaccctaccgaggctgaacttcaggatatgataaatgaagtggatgctgatggtaatggaaccattgactttcctgagttcctaaaccttatggccagaaagatgaaggacactgattctgaggaagagctgaaggaggcattcctcgtttttgacaaggatcaaaatggtttcatttctgctgctgaattgcgccatgtcatgaccaaccttggggagaagctcactgacgaagaagttgatgagatgattcgagaagctgatgttgatggtgacgggcagatcaactatgaagaatttgttaaggtgatgatggccaatgtatag

SEQ ID NO: 3569 - protein, 150 aa, Apium graveolens
MADQLTDDQISEFKEAFSLFDKDGDGCITTKELGTVMRSLGQNPTEAELQDMINEVDADGNGTIDFPEFLNLMARKMKDTDSEEELKEAFLVFDKDQNGFISAAELRHVMTNLGEKLTDEEVDEMIREADVDGDGQINYEEFVKVMMANV

SEQ ID NO: 3570 - DNA, 456 bp, Branchiostoma lanceolatum
  CDS (1)..(456)
atgggcggcgctgagagaatgacagaagaacagatcgccgagttcaaggaagccttctccttgttcgacaaaaatggggatgggaacatcacaactggtgagctgggaactgtcatgaggtcgctgggtcagaatccaactgaagctgagcttctggatatggcaaacgaggttgacgcggacggaaatggcaccatagatttcccagaatccctcaccatgatggctcgaaataagaaggataacaatcaggaagaggaactgcgggaggcgtttaaagtgtttgacaaggatgggaacggctacattagcgccgcggagctgcgtcacgtgatgaccaacctgggagagaagctgacagatgaagaggtggatgagatgatccgagaggctgatgtggatggagacggccaggtaaactaccaagagttcgtttcgatgatgacggagaaataa

SEQ ID NO: 3571 - protein, 151 aa, Branchiostoma lanceolatum
MGGAERMTEEQIAEFKEAFSLFDKNGDGNITTGELGTVMRSLGQNPTEAELLDMANEVDADGNGTIDFPESLTMMARNKKDNNQEEELREAFKVFDKDGNGYISAAELRHVMTNLGEKLTDEEVDEMIREADVDGDGQVNYQEFVSMMTEK

SEQ ID NO: 3572 - DNA, 429 bp, Triticum aestivum
  CDS (1)..(429)
atgcttgactgcttgtcacttttggatcttagagagtggcgtagcttgattgggggttgcattaccaccaaggagctgggaactgtcatgcgttccctggggcagaatcccactgaggcagagcttcaagacatgatcaatgaggtggatgctgacggcaatggaacaattgatttccctgaattcctcaaccttatggcccgcaagatgaaggacactgattctgaggaagaactcaaggaggcattccgtgtgtttgacaaggatcaaaatggttttatctctgctgctgaactgcgccatgtcatgaccaaccttggtgagaagttgactgatgaggaggttgacgagatggtccgtgaggctgatgttgatggtgatggccagatcaactatgatgaatttgttaaagtcatgatggccaagtaa

SEQ ID NO: 3573 - protein, 142 aa, Triticum aestivum
MLDCLSLLDLREWRSLIGGCITTKELGTVMRSLGQNPTEAELQDMINEVDADGNGTIDFPEFLNLMARKMKDTDSEEELKEAFRVFDKDQNGFISAAELRHVMTNLGEKLTDEEVDEMVREADVDGDGQINYDEFVKVMMAK

SEQ ID NO: 3574 - DNA, 450 bp, Triticum aestivum
  CDS (1)..(450)
atggcggaccagctcaccgacgaccagatcgccgaattcaaggaggctttcagcctcttcgacaaggatggggacggttgcattaccaccaaggagctgggaactgtcatgcgttccctggggcagaatcccactgaggcagagcttcaagacatgatcaatgaggtggatgctgacggcaatggaacaattgatttccctgaattcctcaaccttatggcccgcaagatgaaggacactgattctgaggaagaactcaaggaggcattccgtgtgtttgacaaggatcaaaatggttttatctctgctgctgaactgcgccatgtcatgaccaaccttggtgagaagttgactgatgaggaggttgacgagatggtccgtgaggctgatgttgatggtgatggccagatcaactatgatgaatttgttaaagtcatgatggccaagtaa

SEQ ID NO: 3575 - protein, 149 aa, Triticum aestivum
MADQLTDDQIAEFKEAFSLFDKDGDGCITTKELGTVMRSLGQNPTEAELQDMINEVDADGNGTIDFPEFLNLMARKMKDTDSEEELKEAFRVFDKDQNGFISAAELRHVMTNLGEKLTDEEVDEMVREADVDGDGQINYDEFVKVMMAK

SEQ ID NO: 3576 - DNA, 768 bp, Ostreococcus tauri
  CDS (1)..(768)
atgtacgacaaacgaggacgatgtcggtgctcgacgcgtagtgcagagacgaaaaccccatgtgtgcgcccgcgtcgaccgccccgcgatcgcgcgcgacgcgatcgatccaacggctgggaaatcgtcgtcgtcgacgacgacgccgcgcgcgacggcacatcgagacccgtcgcggacgagtccgagagacgcgtgatcgaacgatcggacgcgcgcacacgtagatctgtgatcatggccgctgacctcacggatgagcaaatcgccgagttcaaggaagcgttcgcgctgttcgataaggatggcgatgggacgatcacgacgaaggaactcgggacggtgatgcgatcgctcggacagaaccccacggaggcggagttgcaagatatgatcaacgaagtcgacgcggatggcaacggcacgatcgactttccggaattcttgaacttgatggcgcgaaagatgaaggatacggacagcgaagaggagttgcaggaggcgttcaaggtgttcgataaggatggtaacgggacgatctccgctgcggagttgcgacacgtgatgacgaacctcggggagaaactcaccgacgaagaggtggatgagatgattcgcgaagccgacgtcgacggagacggagaagtcaactacgaagagttcgtcaagatgatgatggcgaagggggggcgccaacgcggtgcggtcaactctgcgcgacgtccacaagtaagccttttgcgcagaggcgattttgaatataaataa

SEQ ID NO: 3577 - protein, 255 aa, Ostreococcus tauri
MYDKRGRCRCSTRSAETKTPCVRPRRPPRDRARRDRSNGWEIVVVDDDAARDGTSRPVADESERRVIERSDARTRRSVIMAADLTDEQIAEFKEAFALFDKDGDGTITTKELGTVMRSLGQNPTEAELQDMINEVDADGNGTIDFPEFLNLMARKMKDTDSEEELQEAFKVFDKDGNGTISAAELRHVMTNLGEKLTDEEVDEMIREADVDGDGEVNYEEFVKMMMAKGGRQRGAVNSARRPQVSLLRRGDFEYK

SEQ ID NO: 3578 - DNA, 450 bp, Taxodium distichum
  CDS (1)..(450)
atggctgagcagttgaccgaggatcagattgcagagttcaaggaggctttcagcctgttcgacaaggatggtgatggttgcattaccaccaaggaattgggaactgttatgcgttccctggggcagaatccaactgaagccgagctccaggacatgatcaatgaagttgatgctgatgggaatgggaccattgactttccagagttcctcaatcttatggctaggaaaatgaaggatacggattcagaggaagaactgaaggaggccttcaaggtttttgacaaggatcagaatggtttcatttctgctgctgagctgcgacatgttatgaccaatctgggggagaagctaactgatgaagaagtggatgagatgattcgtgaagctgatgttgatggagatggtcaagtaaactatgaggaattcgttaggatgatgttggctaaatga

SEQ ID NO: 3579 - protein, 149 aa, Taxodium distichum
MAEQLTEDQIAEFKEAFSLFDKDGDGCITTKELGTVMRSLGQNPTEAELQDMINEVDADGNGTIDFPEFLNLMARKMKDTDSEEELKEAFKVFDKDQNGFISAAELRHVMTNLGEKLTDEEVDEMIREADVDGDGQVNYEEFVRMMLAK

SEQ ID NO: 3580 - DNA, 453 bp, Striga asiatica
  CDS (1)..(453)
atggcagatttactgaatgaagaacaaattgtagagtttcaagaagctttcagcctgtttgacaaagatggagatgggtgcatcaccatagaagaattggctacggtcatggggtcccttgatcaaaacccaactgaaaaggagcttcaggacatgattaatgaagtcgattctgatggaaatgggaccattgagtttgctgagttcttgaatctcatggccaagaaaatgaaggaaactgatgcagaggaagagattcaagaggctttcaaagtttttgacaaggaccaaaatggttacatatcagctaacgagcttcgtaacgtgatgatgaacctaggggaaaaactaacagatgaagaagttgaacaaatgataagagaggctgatttggatggtggtggacaagtcaattatgatgaatttttcaagatgatgaggaccattggatag

SEQ ID NO: 3581 - protein, 150 aa, Striga asiatica
MADLLNEEQIVEFQEAFSLFDKDGDGCITIEELATVMGSLDQNPTEKELQDMINEVDSDGNGTIEFAEFLNLMAKKMKETDAEEEIQEAFKVFDKDQNGYISANELRNVMMNLGEKLTDEEVEQMIREADLDGGGQVNYDEFFKMMRTIG

SEQ ID NO: 3582 - DNA, 492 bp, Chlamydomonas incerta
  CDS (1)..(492)
atggccacgaacaccgagcagctgactgaggagcagatcgccgagttcaaggaggccttcgccctcttcgataaggacggcgatggcacgattaccaccaaggagctggggacggtgatgcgctcgctgggccagaaccccactgaggccgagctgcaagacatgatcagcgaggtggacgctgacggcaacggcactattgatttccctgagttcctgatgctcatggcccgcaagatgaaggagaccgaccacgaggacgagctgcgggaagccttcaaggtgttcgataaggatggcaacggcttcatctcggcggctgagcttcggcacgtgatgaccaacctcggcgagaagctgtctgaggaggaggtcgacgagatgatccgggaggccgacgtggacggcgacggccaggtcaactacgaggagtttgtgcgcatgatgacctccggtgccactgacgacaaggacaagaagggccacaagtaa

SEQ ID NO: 3583 - protein, 163 aa, Chlamydomonas incerta
MATNTEQLTEEQIAEFKEAFALFDKDGDGTITTKELGTVMRSLGQNPTEAELQDMISEVDADGNGTIDFPEFLMLMARKMKETDHEDELREAFKVFDKDGNGFISAAELRHVMTNLGEKLSEEEVDEMIREADVDGDGQVNYEEFVRMMTSGATDDKDKKGHK

SEQ ID NO: 3584 - DNA, 453 bp, Capsicum annuum
  CDS (1)..(453)
atggcagatcagctaactgatgatcagatctctgagttcaaagaagcttttagcctcttcgataaggatggagatggttgcatcacaactaaggagcttggaactgtgatgcggtcactgggtcagaacccaaccgaggctgagctgcaagacatgatcaacgaagttgatgccgatgggaatgggaccatcgacttccctgagttccttaacctgatggctcgcaagatgaaagacactgattccgaggaggagctgaaagaagcttttagagtgtttgacaaggatcagaatggatttatctctgctgctgagcttcgccatgtcatgactaacctaggtgagaagcttacagacgaggaggaggttgatgagatgatccgtgaagctgacgtggatggtgatggacaaatccaatatgacgagttcgtcaaggtcatgatggccaagtga

SEQ ID NO: 3585 - protein, 150 aa, Capsicum annuum
MADQLTDDQISEFKEAFSLFDKDGDGCITTKELGTVMRSLGQNPTEAELQDMINEVDADGNGTIDFPEFLNLMARKMKDTDSEEELKEAFRVFDKDQNGFISAAELRHVMTNLGEKLTDEEEVDEMIREADVDGDGQIQYDEFVKVMMAK

SEQ ID NO: 3586 - DNA, 450 bp, Capsicum annuum
  CDS (1)..(450)
atggcagatcagctcaccgatgatcagatctctgagtttaaggaggctttcagcctattcgataaggacggagatggttgcattacaactaaggagcttgggactgtgatgaggtcgttgggacagaatccaactgaagctgagctccaggacatgataaatgaagtggatgctgatggtaatggaaccatagacttcccagagttcttgatcctcatggccaggaagatgaaggatacagactcagaggaggagctgaaggaggcattcagagtgtttgacaaggaccagaatggtttcatctctgctgctgagctccgtcacgtgatgacaaaccttggcgagaagcttactgatgaagaagttgatgaaatgatcagggaggccgatgtggacggtgatggccaaattaactatgatgaatttgttaaggtcatgatggccaagtga

SEQ ID NO: 3587 - protein, 149 aa, Capsicum annuum
MADQLTDDQISEFKEAFSLFDKDGDGCITTKELGTVMRSLGQNPTEAELQDMINEVDADGNGTIDFPEFLILMARKMKDTDSEEELKEAFRVFDKDQNGFISAAELRHVMTNLGEKLTDEEVDEMIREADVDGDGQINYDEFVKVMMAK

SEQ ID NO: 3588 - DNA, 495 bp, Dunaliella salina
  CDS (1)..(495)
atgcctcccaagggtgccgaggggagtgctgtcgcccctgcggaccagctgacagaggaccagatagcggaattcaaggaggcatttgcgctatttgacaaggatggagatggcaccatcacaacgaaagagctgggcactgtcatgcgttctttggaccaaaaccctacggaggcggagctgcaagacacgattaacgaggtggacgcagacgggaacggcaccatcgacttccctgagtttctcatgctcatggcgcgaaagatgaaggagactgaccaagaggaggagttgagagaagcattcaaggtctttgatcgtgatggcaatgggtttatctcagcagcagagttgcggcatgtaatgacaaacttgggcgagaagttgtcagaacaagaggtggaggagatgattagagaggcagatgttgacaacgacggacaagtcaactatgacgagtttgtgaacatgatgcttgccaagcccttggtgtag

SEQ ID NO: 3589 - protein, 164 aa, Dunaliella salina
MPPKGAEGSAVAPADQLTEDQIAEFKEAFALFDKDGDGTITTKELGTVMRSLDQNPTEAELQDTINEVDADGNGTIDFPEFLMLMARKMKETDQEEELREAFKVFDRDGNGFISAAELRHVMTNLGEKLSEQEVEEMIREADVDNDGQVNYDEFVNMMLAKPLV

SEQ ID NO: 3590 - DNA, 486 bp, Pinctada fucata
  CDS (1)..(486)
atggcggaagatctcacagaagaacaaatcgcagagttccgagaggcgttccacctctttgacaaagatggcagtgggagtatatcagccgaagagctcggaacagtcatgagatctctaggtcaaaaccccaatgaacaagaattacaagatctcgtggaagaaatcgacacagacggcaatggagaggttgatttcaacgagttcttggccatgatggctaagaaaatgaaagacaccgactcggaagaggaaattcgggaagccttcagagtgttcgatagggatgacaaaggttttattactgcttcagaattaaaacatataatgacgacactgggtgagaaaatggacgacgaagaagcagaagagatggtagcggctgcagatattgatggagatggagaaataaattatgaggagtttgtcaaaatgatttcaatgaaagacaccgatcaagaagaacagcaacaagaaaataaatga

SEQ ID NO: 3591 - protein, 161 aa, Pinctada fucata
MAEDLTEEQIAEFREAFHLFDKDGSGSISAEELGTVMRSLGQNPNEQELQDLVEEIDTDGNGEVDFNEFLAMMAKKMKDTDSEEEIREAFRVFDRDDKGFITASELKHIMTTLGEKMDDEEAEEMVAAADIDGDGEINYEEFVKMISMKDTDQEEQQQENK

SEQ ID NO: 3592 - DNA, 450 bp, Catharanthus roseus
  CDS (1)..(450)
atggcggagcagttgactgaggagcagatcgcggagttcaaggaagcttttagcctcttcgacaaggatggaggtggctgcatcactacaaaggagctgggtacagtgatgagatccttggggcagaatcccactgaagctgaactccaagatatgaccaatgaggttgatgctgatcaaaatggcaccattgacttccctgagtttttgaatctcatggctcgcaaaatgaaggatactgattctgaggaggaacttaaagaagcattcaaggtctttgataaggaccaaaatggctttatctctgctgctgagcttcgtcatgtgatgacaaatcttggagagaagttaactgatgaagaagttgatgagatgatcagagaagccgatgtggatggtgatggtcaggtgaattatgaggaatttgtgaggatgatgcttgccaaatga

SEQ ID NO: 3593 - protein, 149 aa, Catharanthus roseus
MAEQLTEEQIAEFKEAFSLFDKDGGGCITTKELGTVMRSLGQNPTEAELQDMTNEVDADQNGTIDFPEFLNLMARKMKDTDSEEELKEAFKVFDKDQNGFISAAELRHVMTNLGEKLTDEEVDEMIREADVDGDGQVNYEEFVRMMLAK

SEQ ID NO: 3594 - DNA, 453 bp, Pisum sativum
  CDS (1)..(453)
atggcacatatcctaagtgaagaacaaattgttgatttcaaagaagcctttggtttgtttgacaaagatggagatggttgcgttactgtggaagaattggccactgttattaggtcactggatcagaatcccactgaggaagagctacaagatatgataagtgaagttgatgcagatggcaatggaaccattgaatttgatgagttcttgaacttgatggcaaggaaaatgaaagacactgatgcagaagaggagctaagagaggctttcaaggtttttgataaagatcaaaatggctatatatctcccagtgagttgagacatgtaatgatgaatctaggtgaaaaattaagtgatgaggaggtgaagcagatgattaaagaagcagatatggatggtgatggtcaagttgattatgatgattttgtgaagatgatgatggccattagatga

SEQ ID NO: 3595 - protein, 150 aa, Pisum sativum
MAHILSEEQIVDFKEAFGLFDKDGDGCVTVEELATVIRSLDQNPTEEELQDMISEVDADGNGTIEFDEFLNLMARKMKDTDAEEELREAFKVFDKDQNGYISPSELRHVMMNLGEKLSDEEVKQMIKEADMDGDGQVDYDDFVKMMMAIR

SEQ ID NO: 3596 - DNA, 450 bp, Bidens pilosa
  CDS (1)..(450)
atggccgatcagctaaccgatgaccagatctctgaatttaaagaagccttcagcctcttcgataaggatggcgatggttgtatcacaacaaaggaacttgggacggtgatgagatcacttgggcaaaatccaaccgaagcagaattgcaagacatgatcaacgaagtggatgcagatggcaatggcaccattgatttcccggagtttctaaacctgatggcaagaaagatgaaggacaccgactctgaagaggagttgaaagaggcgttcagagtgtttgacaaggaccaaaacggcttcatttccgctcgtgagctgcgccatgtgatgacgaatcttggtgagaagcttactgatgaagaagttgatgagatgatccgagaggcggatgttgatggtgatggtcaaatcaactatgaggagtttgttaaggttatgatggctaagtga

SEQ ID NO: 3597 - protein, 149 aa, Bidens pilosa
MADQLTDDQISEFKEAFSLFDKDGDGCITTKELGTVMRSLGQNPTEAELQDMINEVDADGNGTIDFPEFLNLMARKMKDTDSEEELKEAFRVFDKDQNGFISARELRHVMTNLGEKLTDEEVDEMIREADVDGDGQINYEEFVKVMMAK

SEQ ID NO: 3598 - DNA, 453 bp, Glycine max
  CDS (1)..(453)
atggcagatgttctgagtgaagaacagattagtgagatcaaagaagcctttggcttgtttgacaaagatggtgatgggtgcattactgtggacgaatttgtcacggttatccggtcattggttcagaaccccacagaagaagagctccaagacatgataaacgaggtagatgcagatggtaatggaaccattgaatttgttgagtttttgaacttaatggccaagaaaatgaaggaaactgatgaagaggaagatctcaaagaggctttcaaggtgtttgacaaggatcaaaatggctacatttcagcaagtgagttgagacacgttatgatcaatctgggtgaaaaactaactgatgaggaggtggagcagatgattgaagaagcagatttggatggtgatggtcaagttaattatgatgaatttgtcaagatgatgatgactattggatga

SEQ ID NO: 3599 - protein, 150 aa, Glycine max
MADVLSEEQISEIKEAFGLFDKDGDGCITVDEFVTVIRSLVQNPTEEELQDMINEVDADGNGTIEFVEFLNLMAKKMKETDEEEDLKEAFKVFDKDQNGYISASELRHVMINLGEKLTDEEVEQMIEEADLDGDGQVNYDEFVKMMMTIG

SEQ ID NO: 3600 - DNA, 504 bp, Blastocladiella emersonii
  CDS (1)..(504)
atgtcactcgctgttccccagtctcgacaaaacgctacaccagcgggtgccgggccgcccgagctgacggacgaccagaagcacgaggtgcgcgaggccttcgacctgttcgacagcgacaaggacgggcggctcgactaccacgaagtcaaggtggcgatgcgcgcgctcgggatcgaggccaagaaggccgaggtgctcaagtggctcaaggactacgacaagtcgggccgccaggtgctcgagtttgacgactttatgcgcatcgtggccgagaagatcctcgcgcgcgacccgatcgacgagctgcgcaaggccttcacgctgtttgacacggacaagaagggcaagatctcgctgcgcgacctgcggcgcgtggccaaggaggtcggcgagacgctcgacgacgacgagctcgccgccatgatcgaggagtttgacgtcaacggcgacggggagattgacgagcaagagtttctgagcatcatgacggacgactactga

SEQ ID NO: 3601 - protein, 167 aa, Blastocladiella emersonii
MSLAVPQSRQNATPAGAGPPELTDDQKHEVREAFDLFDSDKDGRLDYHEVKVAMRALGIEAKKAEVLKWLKDYDKSGRQVLEFDDFMRIVAEKILARDPIDELRKAFTLFDTDKKGKISLRDLRRVAKEVGETLDDDELAAMIEEFDVNGDGEIDEQEFLSIMTDDY

SEQ ID NO: 3602 - DNA, 525 bp, Blastocladiella emersonii
  CDS (1)..(525)
atggtgtcctccaacaccacgttcaagaagccggcgtcgggcggtgcgagcggcggggccaagaagccgcgcgcggagctgacgcccgagcagaagcaggagatccgcgaggcgttcgacctgttcgacacggacgggtctgggtcgatcgacagcaaggagctcaaggtggcgatgcgcgcgctcgggttcgagcccaagaaggaggagatcaagaagatgatcaacgagattgaccgcgacgggtccgggtccattgatttcaacgagtttctcgagctcatggccgggaaaatggccgagcgcgactcgcgcgaggagatcctcaaggctttcaagctcttcgacgacgacagcacgggcaagatcaccttcaagaacctcaagcgtgtcgcgcgcgagctcggcgagaacctcaccgacgaggagctccaggagatgatcgacgaggccgaccgcgacggcgacggcgagatcaacgaggacgacttcctgcgcatcatgaagaagaccaacctgtactga

SEQ ID NO: 3603 - protein, 174 aa, Blastocladiella emersonii
MVSSNTTFKKPASGGASGGAKKPRAELTPEQKQEIREAFDLFDTDGSGSIDSKELKVAMRALGFEPKKEEIKKMINEIDRDGSGSIDFNEFLELMAGKMAERDSREEILKAFKLFDDDSTGKITFKNLKRVARELGENLTDEELQEMIDEADRDGDGEINEDDFLRIMKKTNLY

SEQ ID NO: 3604 - DNA, 450 bp, Aegiceras corniculatum
  CDS (1)..(450)
atggcggatcagctaaccgaagatcagatctccgagttcagggaggccttcagcctattcgacaaggacggagatggttgcattaccaccaaagagctgggaactgtgatgaggtcgttggggcaaaacccaactgaggcagagctccaggacatgatcaatgaggtggatgctgatgggaatggcaccatagacttccctgagttcctcaacctcatggcaaagaagatggaggataccgactctgaggaggagctgaaagaggccttccgagtctttgacaaggaccagaatggcttcatctccgctgctgagctccgccatgtcatgaccaaccttggcgagaagctcaccgacgaagaagtcgatgagatgatcagggaggctgatgtggacggcgacggccagatcaactacgaggagtttgtcaaggtcatgatggcgaaatga

SEQ ID NO: 3605 - protein, 149 aa, Aegiceras corniculatum
MADQLTEDQISEFREAFSLFDKDGDGCITTKELGTVMRSLGQNPTEAELQDMINEVDADGNGTIDFPEFLNLMAKKMEDTDSEEELKEAFRVFDKDQNGFISAAELRHVMTNLGEKLTDEEVDEMIREADVDGDGQINYEEFVKVMMAK

SEQ ID NO: 3606 - DNA, 450 bp, Quercus petraea
  CDS (1)..(450)
atggcagaccaactcaccgacgaccagatctctgagttcaaggaggccttcagtttgttcgacaaggatggcgacggttgcatcactaccaaggagcttgggactgtgatgaggtcactgggccagaacccaactgaggcagagctccaggacatgattaatgaagttgatgccgatggtaatggaaccattgacttccctgagttccttaaccttatggcgaggaagatgaaggacactgattcggaggaggaacttaaagaagcattcagagtttttgacaaggatcagaatgggttcatctctgctgccgagctgcgccatgtgatgaccaacctcggggagaagctcaccgatgatgaagttgatgagatgatcagggaggctgatgttgatggtgatggccagataaattatgaggagtttgtcaaggtgatgatggccaagtga

SEQ ID NO: 3607 - protein, 149 aa, Quercus petraea
MADQLTDDQISEFKEAFSLFDKDGDGCITTKELGTVMRSLGQNPTEAELQDMINEVDADGNGTIDFPEFLNLMARKMKDTDSEEELKEAFRVFDKDQNGFISAAELRHVMTNLGEKLTDDEVDEMIREADVDGDGQINYEEFVKVMMAK

SEQ ID NO: 3608 - DNA, 450 bp, Quercus petraea
  CDS (1)..(450)
atggcggagcagcttatggaggagcagatcgctgagttcaaggaagccttcagcctctttgacaaggacggcgatggctgcatcactaccaaagagttgggaacagtcatgagatctttggggcaaaatcccactgaagctgaactacaggacatgatcaatgaagttgatgctgatcaaaatggcactattgatttttctgagtttttgaatttgatggcacgaaaaatgaaggatactgattctgaggaggaactcagagaagctttcaaggtgtttgataaggaccagaatggctttatttctgctgcagagcttcgacatgtaatgacaaatcttggggaaaagctgacagatgaagaagtggatgagatgatacgtgaagcagatttggatggtgatggtcaggtgaattatgaggagtttgtgaggatgatgcttgccaagtga

SEQ ID NO: 3609 - protein, 149 aa, Quercus petraea
MAEQLMEEQIAEFKEAFSLFDKDGDGCITTKELGTVMRSLGQNPTEAELQDMINEVDADQNGTIDFSEFLNLMARKMKDTDSEEELREAFKVFDKDQNGFISAAELRHVMTNLGEKLTDEEVDEMIREADLDGDGQVNYEEFVRMMLAK

SEQ ID NO: 3610 - DNA, 450 bp, Codonopsis lanceolata
  CDS (1)..(450)
atggcagaacagttaaccgaggaacagattgctgagttcaaggaagctttcagccttttcgacaaggatggcgatggctgcatcactactaaagagttgggaactgttatgagatcgttggggcagaatcccaccgaggctgaattgcaagatatgatcaatgaagttgatgctgatcagaatggaaccattgattttcctgagttcttgaacttgatggctcgaaaaatgaaggatactgactcagaggaggaactcaaagaagctttcaaggtctttggcaaggatcagaatggatatatttctgctgcggagctgcgccatgtaatgacaaacctaggggagaagctgactgatgaagaagtggatgagatgataagagaagctgacatggatggtgatggtcaagtgaactacgaggagtttgtgaggatgatgcttgctaagtga

SEQ ID NO: 3611 - protein, 149 aa, Codonopsis lanceolata
MAEQLTEEQIAEFKEAFSLFDKDGDGCITTKELGTVMRSLGQNPTEAELQDMINEVDADQNGTIDFPEFLNLMARKMKDTDSEEELKEAFKVFGKDQNGYISAAELRHVMTNLGEKLTDEEVDEMIREADMDGDGQVNYEEFVRMMLAK

SEQ ID NO: 3612 - DNA, 447 bp, Salvia miltiorrhiza
  CDS (1)..(447)
atggcggatccgctcaccgacgagcagatctccgaattcaaggaagccttctcgctattcgacaaggatggcgatggctgcatcactaccaaggagcttggtaccgtgatgcgttctttggggcagaaccccacagaggccgaacttcaggatatgatcaatgaagttgatgctgatggcaatgggacaatcgatttcccagagttcctcaacttgatggccagaaagatgaaggatactgattcagaggaagaactcaaggaagctttccgtgttttcgacagggaccaaaatggattcatttctgcagctgagcttcgacatgtcatgacaaaccttggggagaagcttactgatgaggaggttgatgagatgatccgtgaggctgatgtggatggtgatgggcagatcaactacgaggagttcgtcaaggtcatgatggcctaa

SEQ ID NO: 3613 - protein, 148 aa, Salvia miltiorrhiza
MADPLTDEQISEFKEAFSLFDKDGDGCITTKELGTVMRSLGQNPTEAELQDMINEVDADGNGTIDFPEFLNLMARKMKDTDSEEELKEAFRVFDRDQNGFISAAELRHVMTNLGEKLTDEEVDEMIREADVDGDGQINYEEFVKVMMA

SEQ ID NO: 3614 - DNA, 450 bp, Daucus carota
  CDS (1)..(450)
atggccgatcagctgacggacgaccagatctccgagttcaaggaagctttcagcctgttcgacaaggacggcgatggttgtatcactaccaaggagcttggaaccgtgatgaggtccctgatggccgatcagctgacggacgaccagatctccgagttcaaggaagctttcagcctgttcgacaaggacggcgatggttgtatcactaccaaggagcttggaaccgtgatgaggtccctggactctgaggaagagctgaaggaggctttccgggtgtttgacaaggaccaaaatggcttcatctctgcagctgagcttcgacatgttatgataaacctcggagagaagctgactgatgaagaagttgatgagatgattcgtgaggctgatgtggacggtgatgggcaaatcaattatgaggagttcgtcaaggtcatgatggccaagtga

SEQ ID NO: 3615 - protein, 149 aa, Daucus carota
MADQLTDDQISEFKEAFSLFDKDGDGCITTKELGTVMRSLMADQLTDDQISEFKEAFSLFDKDGDGCITTKELGTVMRSLDSEEELKEAFRVFDKDQNGFISAAELRHVMINLGEKLTDEEVDEMIREADVDGDGQINYEEFVKVMMAK

SEQ ID NO: 3616 - DNA, 450 bp, Daucus carota
  CDS (1)..(450)
atggccgatcagctgacggacgaccagatctccgagttcaaggaagctttcagcctgttcgacaaggacggcgatggttgtatcactaccaaggagcttggaaccgtgatgaggtccctgggacagaatccaacagaggctgagttacaagacatgattaatgaggttgatgcagatgggaacggtacaatcgactttcctgagtttctcaacttgatggcaaggaagatgaaggacaccgactctgaggaagagctgaaggaggctttccgggtgtttgacaaggaccaaaatggcttcatctctgcagctgagcttcgacatgttatgacaaacctcggagagaagctgactgatgaagaagttgatgagatggttcgtgaggctgatgtggacggtgatgggcaaatcaattatgaggagttcgtcaaggtcatgatggccaagtga

SEQ ID NO: 3617 - protein, 149 aa, Daucus carota
MADQLTDDQISEFKEAFSLFDKDGDGCITTKELGTVMRSLGQNPTEAELQDMINEVDADGNGTIDFPEFLNLMARKMKDTDSEEELKEAFRVFDKDQNGFISAAELRHVMTNLGEKLTDEEVDEMVREADVDGDGQINYEEFVKVMMAK

SEQ ID NO: 3618 - DNA, 450 bp, Daucus carota
  CDS (1)..(450)
atggccgatcagctgacggacgaccagatctccgagttcaaggaagctttcagcctgttcgataaggacggcgatggttgtatcactaccaaggagcttggaaccgtgatggggtccctgggacagaatccaacagaggctgagttacaagacatgattaatgaggttgatgcagatgggaacggtacaatcgactttcctgagtttctcaacttgatggcaaggaagatgaaggacaccgactctgaggaagagctgaaggaggctttccgggtgtttgacaaggaccaaaatggcttcatctctgcagctgagcttcgacatgttatgacaaacctcggagagaagctgactgatgaagaagttgatgagatgattcgtgaggctgatgtggacggtgatgggcaaatcaattatgaggaatttgtcaaggttatgatggccaagtaa

SEQ ID NO: 3619 - protein, 149 aa, Daucus carota
MADQLTDDQISEFKEAFSLFDKDGDGCITTKELGTVMGSLGQNPTEAELQDMINEVDADGNGTIDFPEFLNLMARKMKDTDSEEELKEAFRVFDKDQNGFISAAELRHVMTNLGEKLTDEEVDEMIREADVDGDGQINYEEFVKVMMAK

SEQ ID NO: 3620 - DNA, 450 bp, Daucus carota
  CDS (1)..(450)
atggccgatcagctgacggacgaccagatctccgagttcaaggaagctttcagcctgttcgacaaggacggcgatggttgtatcactaccaaggagcttggaaccgtgatgaggtccctgggacagaatccaacagaggctgagttacaagacatgattaatgaggttgatgcagatgggaacggtacaatcgactttcctgagtttctcaacttgatggcaaggaagatgaaggacaccgactctggggaagagctgaaggaggctttccgggtgtttgacaaggaccaaaatggcttcatctctgcagctgagcttcgacatgttatgacaaacctcggagagaagctgactgatgaagaagttgatgagatgattcgtgaggctgatgtggacggtgatgggcaaatcaattatgaggaatttgtcaaggttatgatggccaagtaa

SEQ ID NO: 3621 - protein, 149 aa, Daucus carota
MADQLTDDQISEFKEAFSLFDKDGDGCITTKELGTVMRSLGQNPTEAELQDMINEVDADGNGTIDFPEFLNLMARKMKDTDSGEELKEAFRVFDKDQNGFISAAELRHVMTNLGEKLTDEEVDEMIREADVDGDGQINYEEFVKVMMAK

SEQ ID NO: 3622 - DNA, 450 bp, Daucus carota
  CDS (1)..(450)
atggccgatcagctgacggacgaccagatctccgagttcaaggaagctttcagcctgttcgacaaggacggcgatggttgcatcgctaccaaggagcttgggactgtcatgaggtcgcttggacagaaccccactgaggctgaactacaggatatgataaatgaagtggatgctgatggtaatggaactattgactttcccgagttcttaaaccttatggccagaaagatgaaggacactgattctgaggaagaactcaaggaggcattccgagtgtttgacaaggatcaaaatggtttcatttctgctgctgagttgcgccatgttatgaccaaccttggggagaagctgactgacgaagaagttgatgagatgattcgagaagccgatgttgatggtgatgggcagatcaactatgaagagttcgtcaaggtcatgatggccaagtga

SEQ ID NO: 3623 - protein, 149 aa, Daucus carota
MADQLTDDQISEFKEAFSLFDKDGDGCIATKELGTVMRSLGQNPTEAELQDMINEVDADGNGTIDFPEFLNLMARKMKDTDSEEELKEAFRVFDKDQNGFISAAELRHVMTNLGEKLTDEEVDEMIREADVDGDGQINYEEFVKVMMAK

SEQ ID NO: 3624 - DNA, 450 bp, Daucus carota
  CDS (1)..(450)
atggccgatcagctgacggacgaccagatctccgagttcaaggaagctttcagcctgttcgacaaggacggcgatggttgcatcactaccaaggagcttgggactgtcatgaggtcgcttggacagaaccccactgaggctgaactacaggatatgataaatgaagtggatgctgatggtaatggaactattgactttcccgagttcttaaaccttatggccagaaagatgaaggacactgattctgaggaagaactcaaggaggcattccgagtgtttgacaaggatcaaaatggtttcatttctgctgctgagttgcgccatgttatgaccaaccttggggagaagctgactgacgaagaagttgatgagatgattcgagaagccgatgttgatggtgatgggcggatcaactatgaagaatttgtcaaggttatgatggccaagtaa

SEQ ID NO: 3625 - protein, 149 aa, Daucus carota
MADQLTDDQISEFKEAFSLFDKDGDGCITTKELGTVMRSLGQNPTEAELQDMINEVDADGNGTIDFPEFLNLMARKMKDTDSEEELKEAFRVFDKDQNGFISAAELRHVMTNLGEKLTDEEVDEMIREADVDGDGRINYEEFVKVMMAK

SEQ ID NO: 3626 - DNA, 450 bp, Daucus carota
  CDS (1)..(450)
atggccgatcagctgacggacgaccagatctccgagttcaaggaagctttcagcctgtttgacaaggacggcgatggttgcatcactaccaaggagcttgggactgtcatgaggtcgcttggacagaaccctactgaggctgaactacaggatatgataaatgaagtggatgctgatggtaatggaactattgactttcccgagttcttaaaccttatggccagaaagatgaaggacactgattctgaggaagaactcaaggaggcattccgagtgtttgacaaggatcaaaatggtttcatttctgctgctgagttgcgccatgttatgaccaaccttggggagaagctgactgacgaagaagttgatgagatgattcgagaagccgatgttgatggtgatgggcagatcaactatgtagaatttgtcaaggttatgatggccaagtaa

SEQ ID NO: 3627 - protein, 149 aa, Daucus carota
MADQLTDDQISEFKEAFSLFDKDGDGCITTKELGTVMRSLGQNPTEAELQDMINEVDADGNGTIDFPEFLNLMARKMKDTDSEEELKEAFRVFDKDQNGFISAAELRHVMTNLGEKLTDEEVDEMIREADVDGDGQINYVEFVKVMMAK

SEQ ID NO: 3628 - DNA, 450 bp, Pinctada fucata
  CDS (1)..(450)
atggccgatcagctgacagaggagcagatcgcagaattcaaggaagcgttcagtttgtttgacaaggacggcgatggtacaataacaaccaaggagctgggtacagtaatgaggtcactaggtcagaatccaaccgaggctgaacttcaggatatgatcaacgaagtagacgctgatggaaacggaaccatcgacttcccagaattccttacaatgatggcgcgaaagatgaaagacaccgactcggaagaggaaattagagaagctttcagagtgttcgataaagatggcaatggtttcattagtgcagctgaattacgtcacgtgatgacaaatctcggagaaaaacttacggatgaggaagtagacgagatgattcgtgaagctgatattgacggtgacggacaggttaattatgaagaatttgtgaaaatgatgatgtcgaaatga

SEQ ID NO: 3629 - protein, 149 aa, Pinctada fucata
MADQLTEEQIAEFKEAFSLFDKDGDGTITTKELGTVMRSLGQNPTEAELQDMINEVDADGNGTIDFPEFLTMMARKMKDTDSEEEIREAFRVFDKDGNGFISAAELRHVMTNLGEKLTDEEVDEMIREADIDGDGQVNYEEFVKMMMSK

SEQ ID NO: 3630 - DNA, 447 bp, Arachis hypogaea
  CDS (1)..(447)
atggcggatccgctcaccgacgaacagatctctgagttcaaggaggccttcagcctcttcgataaggacggcgatggttgtattactaccaaggaacttggaaccgtgatgcggtcgcttgggcaaaaccctactgaggcagaacttcaggacatgattaatgaggttgatgccgatggcaatggtactattgatatccccgagttccttaacctgatggctcgcaaaatgaaggatactgactcagaggaggaactgaaggaagccttccgggtgttcgacaaggatcaaaatggtttcatctccgcagctgagctccgccatgtcatgaccaacctcggtgagaagttgacggatgaagaagtcgacgagatgattcgcgaggccgatgttgatggcgacgggcagatcaactacgaggagtttgtcaaggtcatgatggcctag

SEQ ID NO: 3631 - protein, 148 aa, Arachis hypogaea
MADPLTDEQISEFKEAFSLFDKDGDGCITTKELGTVMRSLGQNPTEAELQDMINEVDADGNGTIDIPEFLNLMARKMKDTDSEEELKEAFRVFDKDQNGFISAAELRHVMTNLGEKLTDEEVDEMIREADVDGDGQINYEEFVKVMMA

SEQ ID NO: 3632 - DNA, 447 bp, Arachis hypogaea
  CDS (1)..(447)
atggcggatccgctcaccgacgaacagatctccgagttcaaggaggccttcagcctcttcgacaaggacggcgatggttgtattactaccaaggaacttggtaccgtcatgcggtcgcttgggcagaaccccactgaggcagaacttcaggacatgattaatgaggttgatgccgatggcaacggtactattgatttccccgagttccttaacctgatggctcgcaaaatgaaggatactgactcagaggaggagctgaaggaagccttccgggtgtttgacaaggatcaaaatggtttcatatccgcagctgagctccgccatgtcatgaccaacctcggcgggaagctcacagatgaggaagttgacgagatgattcgcgaggccgatgttgatggcgacgggcagatcaactacgaggagtttgtcaaggtcatgatggcctag

SEQ ID NO: 3633 - protein, 148 aa, Arachis hypogaea
MADPLTDEQISEFKEAFSLFDKDGDGCITTKELGTVMRSLGQNPTEAELQDMINEVDADGNGTIDFPEFLNLMARKMKDTDSEEELKEAFRVFDKDQNGFISAAELRHVMTNLGGKLTDEEVDEMIREADVDGDGQINYEEFVKVMMA

SEQ ID NO: 3634 - DNA, 447 bp, Arachis hypogaea
  CDS (1)..(447)
atggcggatccgctcaccgacgaacagatctctgaattcaaggaagccttcagcttgctcgataaggacggcgatggttgcatcacgaccaaggagcttggagctgttacgcggtcgctaggacagaacccaaccgaggcagagctccaagacatgatcaatgaagtagatgccgatggcaacggcaccattgacttccccgagtttctaaaccttacggccaggaagatgaaggacactgattctgaggaggagctgaaggaggcgttccgcgtctttgacaaggatcaaaacgggttcatttctgctgctgagctccgccacgtgatgaccaaccttggtgagaagctcactgatgaagaagtcgatgagatgatccgcgaggctgatgttgatggtgacggccaaataaactatgaagagtttgtcaaggtcatgatggcctag

SEQ ID NO: 3635 - protein, 148 aa, Arachis hypogaea
MADPLTDEQISEFKEAFSLLDKDGDGCITTKELGAVTRSLGQNPTEAELQDMINEVDADGNGTIDFPEFLNLTARKMKDTDSEEELKEAFRVFDKDQNGFISAAELRHVMTNLGEKLTDEEVDEMIREADVDGDGQINYEEFVKVMMA

SEQ ID NO: 3636 - DNA, 447 bp, Arachis hypogaea
  CDS (1)..(447)
atggcggatccgctcaccgacgaacagatctccgagttcaaggaggccttcagcctcttcgacaaggacggcgatggttgtattactaccaaggaacttggtaccgtcatgcggtcgcttgggcagaaccccactgaggcagaacttcaggacatgattaatgaggttgatgccgatggcaatggtactattgatttccccgagttccttaacctgatggctcgcaaaatgaaggatactgactcagaggaggaactgaaggaagccttccgggtgctcgacaaggatcaaaatggtttcatctccgcagctgagctccgccatgtcatgaccaacctcggtgagaagttgacggatgaggaagtcgacgagatgattcgcgaggccgatgttgatggcgacgggcagatcaactacgaggagtttgtcaaggtcatgatggcctag

SEQ ID NO: 3637 - protein, 148 aa, Arachis hypogaea
MADPLTDEQISEFKEAFSLFDKDGDGCITTKELGTVMRSLGQNPTEAELQDMINEVDADGNGTIDFPEFLNLMARKMKDTDSEEELKEAFRVLDKDQNGFISAAELRHVMTNLGEKLTDEEVDEMIREADVDGDGQINYEEFVKVMMA

SEQ ID NO: 3638 - DNA, 450 bp, Solanum commersonii
  CDS (1)..(450)
atggcggatcagcttactgatgaccagatctctgagttcaaagaggctttcagcttgttcgacaaggacggagatggttgcatcacgaccaaggagcttgggactgtgatgaggtccttgggacagaaccctactgaatctgagctccaggacatgataaacgaggtggatgcagatggtaatggaaccatcgacttcccagagtttctaaacctcgtggccaggaagatgaaggatactgactctgaggaggagttgaaagaggcattcagagttttcgacaaggatcaaaatggcttcatctcagctgctgagcttcgtcatgtgatgactaaccttggagagaagctcactgatgaagaagtcgatgagatgattagggaagcagatgttgatggtgatggacaaatcaactatgaggagtttgttaaggtcatgatggccaagtaa

SEQ ID NO: 3639 - protein, 149 aa, Solanum commersonii
MADQLTDDQISEFKEAFSLFDKDGDGCITTKELGTVMRSLGQNPTESELQDMINEVDADGNGTIDFPEFLNLVARKMKDTDSEEELKEAFRVFDKDQNGFISAAELRHVMTNLGEKLTDEEVDEMIREADVDGDGQINYEEFVKVMMAK

SEQ ID NO: 3640 - DNA, 450 bp, Ceratopteris richardii
  CDS (1)..(450)
atggctgagcaactcaccactgatcagattgcggagttcaaggaggctttcggcttgtttgacaaagacggcgatggttgtattactacaaaggaactggggactgtgatgcggtctcttggccagaatccaaccgaggctgagttgcaggaaatgatcaatgaagttgatgcagatgggaacgggacaattgattttccggagtttcttaacctaatggccaggaaaatgaaggatacagattctgaagaggagctcaaagaggctttcaaagtctttgataaagaccagaatggatttatctctgcagcagagctgcgtcatgtgatgacaaatcttggtgagaagcttactgatgaggaggtggatgagatgatccgggaggcagatgttgatggtgatgggcaagtcaattacgaggagtttgtgaggatgatgctttcaaagtga

SEQ ID NO: 3641 - protein, 149 aa, Ceratopteris richardii
MAEQLTTDQIAEFKEAFGLFDKDGDGCITTKELGTVMRSLGQNPTEAELQEMINEVDADGNGTIDFPEFLNLMARKMKDTDSEEELKEAFKVFDKDQNGFISAAELRHVMTNLGEKLTDEEVDEMIREADVDGDGQVNYEEFVRMMLSK

SEQ ID NO: 3642 - DNA, 468 bp, Nostoc punctiforme
  CDS (1)..(468): transl_table=11
gtgattgatgagcaagaaatagaaaagctgtggcaagccttcaaagtattagatgtagacggcaacggagcaatctcaaccgacgaactgggggaagtaatgcgatcgctaggacaaaatcctacggaaacggggttgcgtgacttaatcaaagagattgacgtggatttgtcaggcactattgactttgacgagtttaaaacgctgatgatcgctaaggtaggcgatcgcgaaagccgcctcaagttagccttcagcgcctttgatgaagacaatagcggccaaattactgccgtcgagttgcggacggtaatgagtcaatttgggctgacagacgctgaattgaaagagatgctacaggaagtagatcatgatggcgatggctcaattgactttgaggaattttgtcagctagtactggaagagtcagagagcaagacaggctataaagactcaccaatctcctag

SEQ ID NO: 3643 - protein, 155 aa, Nostoc punctiforme
MIDEQEIEKLWQAFKVLDVDGNGAISTDELGEVMRSLGQNPTETGLRDLIKEIDVDLSGTIDFDEFKTLMIAKVGDRESRLKLAFSAFDEDNSGQITAVELRTVMSQFGLTDAELKEMLQEVDHDGDGSIDFEEFCQLVLEESESKTGYKDSPIS

SEQ ID NO: 3644 - DNA, 450 bp, Sonneratia paracaseolaris
  CDS (1)..(450)
atggcggatccgctcaccgacgaccagatctccgagttcaaggaggccttcagcctcttcgacaaggacggagacggttccatcacaaccaaggagcttggaactgttatgcggtcactggggcagaacccaacggaggcagagcttcaggacatgatcaatgaggttgatgctgacggtaacggtaccatcgatttcccagagtttcttaacctgatggctaggaagatgaaggacactgactcggaggaagagctcaaggaagctttccgagctttcgacaaggaccaaaatggcttgatttctgctgctgctgagcttcgccatctcatgacaaacctcggtgagaagttgaccgatgaggaagttgatgagatgatccgagaagctgatgtggatggtgatggccagatcaactatgatgagttcgtcaaggtcatgatggcctag

SEQ ID NO: 3645 - protein, 149 aa, Sonneratia paracaseolaris
MADPLTDDQISEFKEAFSLFDKDGDGSITTKELGTVMRSLGQNPTEAELQDMINEVDADGNGTIDFPEFLNLMARKMKDTDSEEELKEAFRAFDKDQNGLISAAAELRHLMTNLGEKLTDEEVDEMIREADVDGDGQINYDEFVKVMMA

SEQ ID NO: 3646 - DNA, 450 bp, Vitis vinifera
  CDS (1)..(450)
atggctgatcagctcaccgatgaccagatctccgagttcaaggaggccttcagcttgttcgacaaagatggagatggttgtatcgctaccaaggagctagggacagtgatgaggtcactggggcaaaatccaactgaggcagagctccaggatatgataaatgaggttgatgctgatggtaatgggactattgactttcctgagtctctaaatctcatggccaggaaaatgaaagatactgattccgaggaggagctgaagaagtcattccgagtctttgacaaggatcagaatggattcatctccgctgctgagctgcgtcatgtaatgacaaacctgggggagaaacttactgatgaagaagttgatgagatgattcgggaggctgatgtggatggtgatgggcagataaactatgaagaattcgtgaaggtgatgatggcgaagtga

SEQ ID NO: 3647 - protein, 149 aa, Vitis vinifera
MADQLTDDQISEFKEAFSLFDKDGDGCIATKELGTVMRSLGQNPTEAELQDMINEVDADGNGTIDFPESLNLMARKMKDTDSEEELKKSFRVFDKDQNGFISAAELRHVMTNLGEKLTDEEVDEMIREADVDGDGQINYEEFVKVMMAK

SEQ ID NO: 3648 - DNA, 453 bp, Nicotiana tabacum
  CDS (1)..(453)
atgggagatatactgaaccaagatcaaattgttgaattgcaagaagctttcagtctatttgacagagatggagatggttgtattacagttgaagaattagcgacagttataaggtcattggatcaaaatccaacagaggaagagctgcaggatatgatcactgaagttgattcagatgggaatggaaccattgaattcactgaattcttgaaccttatggccaagaaaatgaaggacactgatgctgaggaagaacttaaagaggctttcaaggtgttcgacaaagatcaaaatggttatatatctgctaacgagctgaggcatgtaatgatcaatttaggggagaaactaacagatgaagaggttgagcagatgattaaagaagcagacttggatggtgatggtcaagtcaactttgatgaatttgtgaaaatgatgatgaacgtcggatag

SEQ ID NO: 3649 - protein, 150 aa, Nicotiana tabacum
MGDILNQDQIVELQEAFSLFDRDGDGCITVEELATVIRSLDQNPTEEELQDMITEVDSDGNGTIEFTEFLNLMAKKMKDTDAEEELKEAFKVFDKDQNGYISANELRHVMINLGEKLTDEEVEQMIKEADLDGDGQVNFDEFVKMMMNVG

SEQ ID NO: 3650 - DNA, 447 bp, Castanea sativa
  CDS (1)..(447)
atggcaggacaacttacaggacaaatcgcagagtttaaggggatcttttctttgtttgacaaggacggggatggctgcatcactaccaaagagttgggaacagtcatgagatctttgggacagaatcccactgaagctgaactacaggacatgatcaatgaagttgatgctgatcaaaatggcactattgatttttctgagtttctgaatttgatggcacgaaaaatgaaggatactgattctgaggaggaactcaaagaagctttcaaggtgtttgataaggaccagaatggctttatttctgctgcagagcttcgacatgtaatgacaaatcttggggaaaagctgacagatgaagaagtcgatgagatgatacagaaagcagatttggatggtgatggtcaggtgaattatcaggagtttgtaagaatgatgcttgccaagtaa

SEQ ID NO: 3651 - protein, 148 aa, Castanea sativa
MAGQLTGQIAEFKGIFSLFDKDGDGCITTKELGTVMRSLGQNPTEAELQDMINEVDADQNGTIDFSEFLNLMARKMKDTDSEEELKEAFKVFDKDQNGFISAAELRHVMTNLGEKLTDEEVDEMIQKADLDGDGQVNYQEFVRMMLAK

SEQ ID NO: 3652 - DNA, 447 bp, Chara corallina
  CDS (1)..(447)
atgtctgatttgaccgacgagcagatctccgagttcaaggaggctttcagtctttttgacaaggatggcgatgggagcatcaccacgaaggagctcgggactgtgatgaggtctctcggtcagaatcctacggaggctgagctgcaggatatgatcaatgaggttgacgttgatgggaacggaaccatcgatttccacgagttcttgaacctgatggcgagaaagatgaaggacacagactccgaggaggaacttaaagaagccttcaaggtttttgacaaagaccagaacggatacatttccgctgcggagcttcgtcatgtgatgacgaacctcggcgagaagctgacagacgaggaggtggatgaaatgatccgggaggccgatgtcgatggcgatgggcaagtcaattacgaggagttcgtgaagatgatgatggcgaagtga

SEQ ID NO: 3653 - protein, 148 aa, Chara corallina
MSDLTDEQISEFKEAFSLFDKDGDGSITTKELGTVMRSLGQNPTEAELQDMINEVDVDGNGTIDFHEFLNLMARKMKDTDSEEELKEAFKVFDKDQNGYISAAELRHVMTNLGEKLTDEEVDEMIREADVDGDGQVNYEEFVKMMMAK

SEQ ID NO: 3654 - DNA, 450 bp, Brassica napus
  CDS (1)..(450)
atggcagaccaactcaccgacgaccagatctctgagttcaaggaggccttcagcttgttcgacaaggatggcgacggttgcatcactaccaaggaacttgggactgtgatgaggtctctgggccagaacccaactgaggcagagctgcaggacatgatcaacgaagttgatgctgatggtaatggaactattgacttccctgagttcctaaacctgatggctaggaagatgaaggacactgattcggaggaggaacttaaagaagcattccgagttttcgacaaggatcagaatggtttcatctctgctgatgagctgcgccatgtgatgaccaacctcggtgagaagctaaccgatgatgaagttgatgagatgatcagggaggctgatgttgatggtgatggccagataaattacgaggagtttgtcaaggtgatgatggctaagtga

SEQ ID NO: 3655 - protein, 149 aa, Brassica napus
MADQLTDDQISEFKEAFSLFDKDGDGCITTKELGTVMRSLGQNPTEAELQDMINEVDADGNGTIDFPEFLNLMARKMKDTDSEEELKEAFRVFDKDQNGFISADELRHVMTNLGEKLTDDEVDEMIREADVDGDGQINYEEFVKVMMAK

SEQ ID NO: 3656 - DNA, 522 bp, Branchiostoma floridae
  CDS (1)..(522)
atggtcgggaaaggggccttccttgtagggattctcctgctcctgacacaaacgacaacagtcgcagaactagccatgacagatcagctgacggaggtacaggttgcggagataagggaagccttctccttgttcgacacagacgggaagggttgtatcaccaccgcggatctgggaactgtcatggcgtcgctgggccagaaccctacggcagccgagattcgagatatggtgaaagaggctgacgcggacggaaatggaaccatagatttcccacaattcctcagtatgatggcgcgaactctggagactgacgcccacgaggagctgaaggaagcgttcgcggttttcgacaagaatggtgacggtttcatcagtatggtggagctgcggcacatcctgatgaacacgggagagaagctgacagatgaggagatggaggagatgatgcgggaggctgaccttggtggagatgggaagctcaactacgaggagttcgtgaaagtgatgaatgcccaatag

SEQ ID NO: 3657 - protein, 173 aa, Branchiostoma floridae
MVGKGAFLVGILLLLTQTTTVAELAMTDQLTEVQVAEIREAFSLFDTDGKGCITTADLGTVMASLGQNPTAAEIRDMVKEADADGNGTIDFPQFLSMMARTLETDAHEELKEAFAVFDKNGDGFISMVELRHILMNTGEKLTDEEMEEMMREADLGGDGKLNYEEFVKVMNAQ

SEQ ID NO: 3658 - DNA, 444 bp, Branchiostoma floridae
  CDS (1)..(444)
atggcagctcaactgacacgggagcagatcgctgagtttaaagaggccttctctatgttcgacaaggatggtgttatcactataaaggagctggggactgtcatgagatcgctgggtcagaatccaaatcaagctgaacttcaggacatgataaacgaggtagacacggacggaaacggaaccatagacttctcagaattcctcaccatgatggcgcggaagatgggggaaaccgactcagaagaggagattagggaagcattccggcatttcgataaggattgcaacggctacatcaaccgttcggagcttaagcaagtgatgtccaagctgggagagaagctgacagatgaagagctggatgagatgatccaagaggccgacattgatggagatgggcagatcaactacgaagagttcgtgaagatgatgatgtcaaaatga

SEQ ID NO: 3659 - protein, 147 aa, Branchiostoma floridae
MAAQLTREQIAEFKEAFSMFDKDGVITIKELGTVMRSLGQNPNQAELQDMINEVDTDGNGTIDFSEFLTMMARKMGETDSEEEIREAFRHFDKDCNGYINRSELKQVMSKLGEKLTDEELDEMIQEADIDGDGQINYEEFVKMMMSK

SEQ ID NO: 3660 - DNA, 450 bp, Phaseolus vulgaris
  CDS (1)..(450)
atggccgatcaactcaccgacgagcagatctccgagttcaaggaagccttcagcctcttcgacaaggacggcgatggttgtattacaaccaaggaacttggaaccgtgatgaggtcacttgggcaaaacccaactgaggctgagctgcaggacatgataaacgaggttgatgctgatgggaatggtaccattgatttcccagaattcctgaacctcatggcgcgcaagatgaaagacactgattcggaggaggagctgaaggaggccttccgcgtgtttgacaaggatcagaacggtttcatctctgctgcagagctccgccatgtgatgaccaatctcggcgagaagctgacctacgaggaggttgacgagatgattcgcgaggcagatgttgacggtgacgggcagatcaactatgaggagtttgtcaaagtcatgatggccaagtga

SEQ ID NO: 3661 - protein, 149 aa, Phaseolus vulgaris
MADQLTDEQISEFKEAFSLFDKDGDGCITTKELGTVMRSLGQNPTEAELQDMINEVDADGNGTIDFPEFLNLMARKMKDTDSEEELKEAFRVFDKDQNGFISAAELRHVMTNLGEKLTYEEVDEMIREADVDGDGQINYEEFVKVMMAK

SEQ ID NO: 3662 - DNA, 447 bp, Drosophila melanogaster
  CDS (1)..(447)
atgtccgaactaacggaggagcagattgccgagttcaaggatgcctttgtccagttcgacaaggagggaaccggcaagatcgccacccgtgagctgggcacattgatgcgcaccttgggccagaatccaacggaggccgagttgcaagatttgatagctgaggccgagaacaacaacaatggccaactgaacttcactgagttctgcggtataatggccaagcaaatgcgggaaactgacactgaggaggaaatgcgtgaggcattcaagatttttgatcgtgatggcgatggctttatatcaccagctgagcttcgctttgtgatgatcaatctgggcgaaaaggtcaccgacgaggagatcgatgagatgattcgcgaggctgattttgatggggatggcatgatcaactacgaggaattcgtatggatgataagccagaagtag

SEQ ID NO: 3663 - protein, 148 aa, Drosophila melanogaster
MSELTEEQIAEFKDAFVQFDKEGTGKIATRELGTLMRTLGQNPTEAELQDLIAEAENNNNGQLNFTEFCGIMAKQMRETDTEEEMREAFKIFDRDGDGFISPAELRFVMINLGEKVTDEEIDEMIREADFDGDGMINYEEFVWMISQK

SEQ ID NO: 3664 - DNA, 450 bp, Arabidopsis thaliana
  CDS (1)..(450)
atggcggatcagctaactgatgaacagatctctgagtttaaggaagcttttagcctcttcgacaaagatggagatggttgcatcaccacaaaggagctgggaacagtgatgcggtcactagggcagaacccaacagaagctgagctacaagacatgatcaacgaggttgacgctgatggaaacggaaccattgacttccctgagttcttaaacctaatggctaaaaagatgaaggacacagactcggaggaagagctgaaagaagctttcagggtgttcgacaaagaccagaacggtttcatatccgctgcagagcttcgccatgtgatgacgaatctaggtgagaaactgactgatgaagaggtcgaggagatgattcgtgaagcagatgttgatggagatggtcagataaactacgaggagtttgtcaagattatgatggctaagtga

SEQ ID NO: 3665 - protein, 149 aa, Arabidopsis thaliana
MADQLTDEQISEFKEAFSLFDKDGDGCITTKELGTVMRSLGQNPTEAELQDMINEVDADGNGTIDFPEFLNLMAKKMKDTDSEEELKEAFRVFDKDQNGFISAAELRHVMTNLGEKLTDEEVEEMIREADVDGDGQINYEEFVKIMMAK

SEQ ID NO: 3666 - DNA, 450 bp, Branchiostoma floridae
  CDS (1)..(450)
atggcagatcagctgacagaggaacagatcgctgaattcaaggaggccttcagcctcttcgacaaggatggtgatggcaccatcaccacaaaagagttgggcacagtgatgaggtcactgggacagaacccaacagaggcagagctgcaggatatgatcaatgaagttgatgcagatggtaatggtacgattgacttccctgagttcctcacaatgatggcccggaagatgaaggacacagacagtgaggaggagatccgtgaagcattccgcgtgttcgacaaggatggtaacggcttcatcagtgcggcagagttgcgccatgttatgaccaatcttggagagaagctaacagacgaggaagtggatgagatgatccgggaggcagatatcgatggtgacggccaagtcaactatgaggaattcgtcaccatgatgacgtccaaatga

SEQ ID NO: 3667 - protein, 149 aa, Branchiostoma floridae
MADQLTEEQIAEFKEAFSLFDKDGDGTITTKELGTVMRSLGQNPTEAELQDMINEVDADGNGTIDFPEFLTMMARKMKDTDSEEEIREAFRVFDKDGNGFISAAELRHVMTNLGEKLTDEEVDEMIREADIDGDGQVNYEEFVTMMTSK

SEQ ID NO: 3668 - DNA, 450 bp, Daucus carota
  CDS (1)..(450)
atggccgatcaactcaccgacgatcagatctccgagttcaaggaagctttcagcctgttcgacaaggacggcgatggttgcatcactaccaaggagcttgggactgtcatgaggtcgcttggacagaaccctactgaggctgaactacaggatatgataaatgaagtggatgctgatggtaatggaactattgactttcccgagttcttaaaccttatggccagaaagatgaaggacactgattctgaggaagaactcaaggaggcattccgagtgtttgacaaggatcaaaatggtttcatttctgctgctgagttgcgccatgttatgaccaaccttggggagaagctgactgacgaagaagttgatgagatgattcgagaagccgatgttgatggtgatgggcagatcaactatgaagaatttgtcaaggtgatgatggctaagtga

SEQ ID NO: 3669 - protein, 149 aa, Daucus carota
MADQLTDDQISEFKEAFSLFDKDGDGCITTKELGTVMRSLGQNPTEAELQDMINEVDADGNGTIDFPEFLNLMARKMKDTDSEEELKEAFRVFDKDQNGFISAAELRHVMTNLGEKLTDEEVDEMIREADVDGDGQINYEEFVKVMMAK

SEQ ID NO: 3670 - DNA, 450 bp, Solanum tuberosum
  CDS (1)..(450)
atggcagagcagctgacggaggagcagatcgccgagttcaaggaagcttttagccttttcgacaaggatggcgatggctgtattactaccaaggagttgggaacagtgatgagatcacttggtcagaatcccactgaagctgaactacaggatatgatcagtgaagctgatgctgatcagaatggaaccattgattttccagagttcttgaatctgatggcacgtaagatgaaggacactgattctgaggaggaactcaaagaggctttcaaggttttcgataaagatcagaatggctttatttctgcagctgagcttcgtcatgtaatgacaaaccttggagagaagctgactgatgaagaggtggatgagatgatccgagaggcagatattgatggtgatgggcaagttaattatgaggagtttgtccgtatgatgcttgccaagtga

SEQ ID NO: 3671 - protein, 149 aa, Solanum tuberosum
MAEQLTEEQIAEFKEAFSLFDKDGDGCITTKELGTVMRSLGQNPTEAELQDMISEADADQNGTIDFPEFLNLMARKMKDTDSEEELKEAFKVFDKDQNGFISAAELRHVMTNLGEKLTDEEVDEMIREADIDGDGQVNYEEFVRMMLAK

SEQ ID NO: 3672 - DNA, 450 bp, Arabidopsis thaliana
  CDS (1)..(450)
atggcagatcagctcaccgatgatcagatctctgagttcaaggaagcttttagccttttcgacaaagacggagatggttgcatcacaacgaaagagctaggaacagtgatgagatcattaggtcaaaatccaacagaagcagagttacaagatatgataaacgaagtagatgctgatggtaacggaaccatagacttccctgagtttctgaacctaatggctaggaagatgaaggacactgactctgaagaagagctcaaagaagctttcagggttttcgataaggaccagaacggtttcatctcggcagctgagttaagacatgtaatgacaaatcttggtgagaagttaactgatgaagaagttgatgagatgatcaaagaagctgatgttgatggagatggtcagatcaattatgaagagtttgtcaaagttatgatggcaaagtga

SEQ ID NO: 3673 - protein, 149 aa, Arabidopsis thaliana
MADQLTDDQISEFKEAFSLFDKDGDGCITTKELGTVMRSLGQNPTEAELQDMINEVDADGNGTIDFPEFLNLMARKMKDTDSEEELKEAFRVFDKDQNGFISAAELRHVMTNLGEKLTDEEVDEMIKEADVDGDGQINYEEFVKVMMAK

SEQ ID NO: 3674 - DNA, 450 bp, Branchiostoma floridae
  CDS (1)..(450)
atggcagaccaactgacagaggagcagatcgctgagttcaaagaggccttctctttgttcgacaaggatggaaatggcaacatcactacaaaggagctgggaactgtcatgagatcgctgggtcagaatccgacggaaggtgaacttcaggatatgataaacgaggttgatgcagacggaaacggaaccatagacttcccagaattcctcaccatgatggccaggaagatgaaggacaccgactcagaagaggagattagggaagcatttaaggttttcgataaggatggtaacgggttcatcagcgctgcggagctgcgtcacgtgatgaccaacccgggagagaagctgacagatgaagaggtggatgagatgatccgagaggctgacatagacggagatgggcaggtcaactacgaagagttcgtgaagatgatgacttcaaaatga

SEQ ID NO: 3675 - protein, 149 aa, Branchiostoma floridae
MADQLTEEQIAEFKEAFSLFDKDGNGNITTKELGTVMRSLGQNPTEGELQDMINEVDADGNGTIDFPEFLTMMARKMKDTDSEEEIREAFKVFDKDGNGFISAAELRHVMTNPGEKLTDEEVDEMIREADIDGDGQVNYEEFVKMMTSK

SEQ ID NO: 3676 - DNA, 450 bp, Branchiostoma lanceolatum
  CDS (1)..(450)
atggctgaccaactgacagaggagcagattgctgagttcaaggaagccttctccttgttcgacaaagatggggacggtaccatcaccacaaaggagctgggaactgtcatgaggtcgctgggtcagaacccaaccgaagctgaacttcaggatatgataaacgaggtagacgcggacggaaacggaaccatagacttcccagagttcctcaccatgatggcccggaagatgaaggacaccgactcggaagaagagattcgtgaagcatttcgggtgttcgataaggatggcaacggcttcatcagcgctgcggagctgcgtcacgtgatgaccaacctgggagagaagctgacagatgaagaggtggatgagatggtccgagaggctgacatcgacggagatggccaggtcaactacgaagagttcgtggagatgatgacttcaaaataa

SEQ ID NO: 3677 - protein, 149 aa, Branchiostoma lanceolatum
MADQLTEEQIAEFKEAFSLFDKDGDGTITTKELGTVMRSLGQNPTEAELQDMINEVDADGNGTIDFPEFLTMMARKMKDTDSEEEIREAFRVFDKDGNGFISAAELRHVMTNLGEKLTDEEVDEMVREADIDGDGQVNYEEFVEMMTSK

SEQ ID NO: 3678 - DNA, 450 bp, Petunia hybrida
  CDS (1)..(450)
atggcggaacagctaacggaggagcagatcgctgagtttaaggaagcttttagcctttttgacaaggacggtgacggctgtattactaccaaggagttgggaacagtgatgagatcacttggtcagaatcccactgaagctgaacttcaggatatgatcagcgaagttgatgctgatcagaatggaactatcgactttccagagttcttgaatctgatggcacgtaagatgaaggacactgattctgaagaggaacttaaagaagctttcaaagtttttgacaaagatcagaatggatatatttcagcggctgacgttcgtcatgtaatgacaaaccttggtgagaaactgactgatgaagaggttgatgagatgatccgtgaggcagatatggatggcgatgggcaagttaattatgaagagtttgtccgcatgatgcttgccaaatga

SEQ ID NO: 3679 - protein, 149 aa, Petunia hybrida
MAEQLTEEQIAEFKEAFSLFDKDGDGCITTKELGTVMRSLGQNPTEAELQDMISEVDADQNGTIDFPEFLNLMARKMKDTDSEEELKEAFKVFDKDQNGYISAADVRHVMTNLGEKLTDEEVDEMIREADMDGDGQVNYEEFVRMMLAK

SEQ ID NO: 3680 - DNA, 450 bp, Oryza sativa subsp. indica
  CDS (1)..(450)
atggcggaccagctcaccgacgaccagatcgccgagttcaaggaggccttcagcctcttcgacaaggacggcgacggttgtattactactaaggagttgggaactgtcatgcgttcgctggggcagaacccaactgaggcagaactacaagacatgatcaatgaggtggatgctgacggcaatggaacaatcgatttccctgaatttctcaacctgatggcccgcaagatgaaagatactgattctgaggaagagctcaaggaggcgttccgtgtgttcgacaaggaccaaaacggttttatctctgctgctgaattgcgtcacgtcatgactaaccttggtgagaagctgacagatgaggaggttgacgagatgatccgtgaggccgatgttgatggtgatgggcagatcaactacgatgaattcgttaaagtcatgatggccaagtaa

SEQ ID NO: 3681 - protein, 149 aa, Oryza sativa subsp. indica
MADQLTDDQIAEFKEAFSLFDKDGDGCITTKELGTVMRSLGQNPTEAELQDMINEVDADGNGTIDFPEFLNLMARKMKDTDSEEELKEAFRVFDKDQNGFISAAELRHVMTNLGEKLTDEEVDEMIREADVDGDGQINYDEFVKVMMAK

SEQ ID NO: 3682 - DNA, 555 bp, Petunia hybrida
  CDS (1)..(555)
atggcagatcaactcactgatgatcagatctctgagttcaaagaagcctttagcctattcgacaaagatggagatggttgtatcactactaaggagcttggaaccgtgatgcggtcattgggacagaacccaactgaggctgagcttcaagacatgattaatgaagttgatgctgatgggaatgggaccattgacttccctgagttcctaaacctgatggctcgcaagatgaaggacactgattctgaggaggagctcaaggaagcttttagagtgtttgacaaggatcagaatggatttatctctgcagctgagcttcgccatgtcatgacaaacctaggtgagaagcttacagacgaagaggttgatgagatgatccgtgaagctgacgtggatggtgacggccagatcaactatgaggagttcgtcaaggtcatgatggccaataggaggagaaggaggattgaagaaagtaagagatcagtcaactcaaatatctcacggagcaacaatggaaggaaggtccgcaagagagatcgatgcacaatactgtga

SEQ ID NO: 3683 - protein, 184 aa, Petunia hybrida
MADQLTDDQISEFKEAFSLFDKDGDGCITTKELGTVMRSLGQNPTEAELQDMINEVDADGNGTIDFPEFLNLMARKMKDTDSEEELKEAFRVFDKDQNGFISAAELRHVMTNLGEKLTDEEVDEMIREADVDGDGQINYEEFVKVMMANRRRRRIEESKRSVNSNISRSNNGRKVRKRDRCTIL

SEQ ID NO: 3684 - DNA, 450 bp, Solanum tuberosum
  CDS (1)..(450)
atggcagatcagctcaccgaagatcagatctctgagttcaaggaggctttcagcctattcgacaaggacggagatggttgcattacaactaaggagcttgggactgtgatgaggtcgttgggacagaacccaactgaagctgagctccaggacatgataaatgaagtggatgctgatggtaatggaaccatcgacttcccagagtttttgaacctcatggcgaggaagatgaaggatacagactcagaggaggagctgaaggaggcattcagagtgtttgacaaggaccagaatgggttcatctctgctgctgagctccgtcatgtaatgactaaccttggtgagaagcttactgatgaagaagttgatgaaatgatcagggaggctgatgttgatggcgatggacaaattaactacgatgagtttgttaaggtcatgatggccaagtga

SEQ ID NO: 3685 - protein, 149 aa, Solanum tuberosum
MADQLTEDQISEFKEAFSLFDKDGDGCITTKELGTVMRSLGQNPTEAELQDMINEVDADGNGTIDFPEFLNLMARKMKDTDSEEELKEAFRVFDKDQNGFISAAELRHVMTNLGEKLTDEEVDEMIREADVDGDGQINYDEFVKVMMAK

SEQ ID NO: 3686 - DNA, 450 bp, Arabidopsis thaliana
  CDS (1)..(450)
atggcggatcagctcaccgatgaccagatctcagagttcaaggaagcctttagcctcttcgataaggatggtgatggttgtatcaccaccaaggagctcggaaccgtgatgaggtctctggggcaaaacccaacagaagctgagcttcaagacatgatcaatgaagttgatgcagatgggaacgggaccattgatttcccggagttcctgaacctgatggcaaggaaaatgaaggacactgattcagaggaagagctcaaggaagcttttagggtttttgataaagaccagaatggtttcatatctgcagcagagcttcgacatgtcatgacaaatctcggtgagaagctatccgatgaggaagttgatgagatgatccgagaagcggatgttgatggcgatggtcagattaactatgaagaattcgtcaaagtcatgatggctaagtga

SEQ ID NO: 3687 - protein, 149 aa, Arabidopsis thaliana
MADQLTDDQISEFKEAFSLFDKDGDGCITTKELGTVMRSLGQNPTEAELQDMINEVDADGNGTIDFPEFLNLMARKMKDTDSEEELKEAFRVFDKDQNGFISAAELRHVMTNLGEKLSDEEVDEMIREADVDGDGQINYEEFVKVMMAK

SEQ ID NO: 3688 - DNA, 450 bp, Halocynthia roretzi
  CDS (1)..(450)
atggccgatcagcttactgaagaacaaatagcagaattcaaggaagcgttctcgcttttcgacaaggacggtgatggcaccatcacgactaaggaattaggaactgttatgagatctctcggtcagaatccaactgaagcagagttgcaggacatgatcaatgaagttgatgctgatggcaatgggacgatagatttccctgaatttttgacaatgatggccagaaaaatgaaagaaacagatagtgaagaggagatcagagaggcattcagggtttttgataaagacggcaatggcttcatctcagctgctgagttgcgacatgtgatgacaaatcttggtgaaaaactcacagacgaagaagtcgatgaaatgattcgagaagcggatatagacggcgatggacaagttaactatgaagagtttgtgacaatgatgacatgcaaatga

SEQ ID NO: 3689 - protein, 149 aa, Halocynthia roretzi
MADQLTEEQIAEFKEAFSLFDKDGDGTITTKELGTVMRSLGQNPTEAELQDMINEVDADGNGTIDFPEFLTMMARKMKETDSEEEIREAFRVFDKDGNGFISAAELRHVMTNLGEKLTDEEVDEMIREADIDGDGQVNYEEFVTMMTCK

SEQ ID NO: 3690 - DNA, 450 bp, Ajellomyces capsulata
  CDS (1)..(450)
atggccgactctttgactgaagagcaagtatccgaatacaaggaggccttctctctattcgataaagatggcgatgggcaaatcaccaccaaagagttgggaacagtaatgcggtctctggggcaaaacccttccgaatcagaactacaggacatgatcaatgaggttgatgcagataacaatggaaccattgacttcccggagtttttgactatgatggcaaggaaaatgaaggataccgattctgaagaagaaattcgagaagcattcaaagttttcgatcgtgataacaacgggtttatctctgctgccgagttacgccacgtgatgacttcgattggtgagaaattgaccgatgatgaggttgatgagatgattcgtgaggcagaccaggatggtgatggacgaatcgactataacgaatttgtccaactcatgatgcagaaatag

SEQ ID NO: 3691 - protein, 149 aa, Ajellomyces capsulata
MADSLTEEQVSEYKEAFSLFDKDGDGQITTKELGTVMRSLGQNPSESELQDMINEVDADNNGTIDFPEFLTMMARKMKDTDSEEEIREAFKVFDRDNNGFISAAELRHVMTSIGEKLTDDEVDEMIREADQDGDGRIDYNEFVQLMMQK

SEQ ID NO: 3692 - DNA, 450 bp, Blastocladiella emersonii
  CDS (1)..(450)
atggccgaccagcttaccgaggagcagattgccgagttcaaggaggcgttctccctgttcgacaaggacggcgatggcaccatcaccaccaaggagctcggcaccgtcatgcgctccctcggccagaaccccaccgaggccgagctcctcgtcatgatcaacgaggtcgatgccgacggcaacggcaccatcgacttccccgagttcctcaccatgatggcgcgcaagatgaaggactcggactcggaggaggagatcaaggaggccttcaaggtgttcgacaaggacggcaacggctacatctcggccgccgagctccgccacgtcatgaccaacctcggcgagaagctgtccgaggacgaggtcgaggagatgatccgcgaggctgacgtcgatggcgatggccagatcaactacgaggagttcgtcaagatgatgatgtccaagtaa

SEQ ID NO: 3693 - protein, 149 aa, Blastocladiella emersonii
MADQLTEEQIAEFKEAFSLFDKDGDGTITTKELGTVMRSLGQNPTEAELLVMINEVDADGNGTIDFPEFLTMMARKMKDSDSEEEIKEAFKVFDKDGNGYISAAELRHVMTNLGEKLSEDEVEEMIREADVDGDGQINYEEFVKMMMSK

SEQ ID NO: 3694 - DNA, 450 bp, Candida albicans
  CDS (1)..(450): transl_table=12
atggctgaaaaattatcagaacaacaaattgctgaattcaaagaagcattttctttattcgataaagatagcgatggtaaaataactaccaaagaattaggtacagttatgagatctttaggtcaaaacccatctgaaagtgagttgactgacatgataaatgaagttgatgtcaactctgatggttcaattgatttcccggaatttttgactatgatggcaagaaagatgaaggatacagactcagaggcagaaattgcagaagcattcaaagtatttgacagaaacggtgatgggaaaatcagtgctgccgagttaagacaccttttgacttcaattggtgagaaattgtctgatgctgatgtggatcaaatgattaaagaagctgataccaacaatgatggtgagattgatatccaagaatttactctgttattagcagctaaataa

SEQ ID NO: 3695 - protein, 149 aa, Candida albicans
MAEKLSEQQIAEFKEAFSLFDKDSDGKITTKELGTVMRSLGQNPSESELTDMINEVDVNSDGSIDFPEFLTMMARKMKDTDSEAEIAEAFKVFDRNGDGKISAAELRHLLTSIGEKLSDADVDQMIKEADTNNDGEIDIQEFTSLLAAK

SEQ ID NO: 3696 - DNA, 450 bp, Capsicum annuum
  CDS (1)..(450)
atggcagatcagctcaccgatgatcagatctctgagtttaaggaggctttcagcctattcgataaggacggagatggttgcattacaactaaggagcttgggactgtgatgaggtcgttgggacagaatccaactgaagctgagctccaggacatgataaatgaagtggatgctgatggtaatggaaccatagacttcccagagttcttgaacctcatggccaggaagatgaaggatacagactcagaggaggagctgaaggaggcattcagagtgtttgacaaggaccagaatggtttcatctctgctgctgagctccgtcacgtgatgacaaaccttggcgagaagcttactgatgaagaagttgatgaaatgatcagggaggccgatgtggacggtgatgggcaaattaactatgatgaatttgttaaggtcatgatggccaagtga

SEQ ID NO: 3697 - protein, 149 aa, Capsicum annuum
MADQLTDDQISEFKEAFSLFDKDGDGCITTKELGTVMRSLGQNPTEAELQDMINEVDADGNGTIDFPEFLNLMARKMKDTDSEEELKEAFRVFDKDQNGFISAAELRHVMTNLGEKLTDEEVDEMIREADVDGDGQINYDEFVKVMMAK

SEQ ID NO: 3698 - DNA, 492 bp, Chlamydomonas reinhardtii
  CDS (1)..(492)
atggccgcgaacaccgagcagctgaccgaggagcagatcgctgagttcaaggaggccttcgccctcttcgataaggacggcgatggcacgattaccaccaaggagctggggacggtcatgcgctcgctgggccagaaccccaccgaggctgagctgcaagacatgatcagcgaggtggacgccgacggcaacggcaccattgatttccctgagttcctgatgctcatggcccgcaagatgaaggagactgaccacgaggatgagctgcgggaagccttcaaggtgttcgataaggatggcaacggcttcatctcggccgctgagcttcggcacgtgatgaccaacctgggcgagaagctgtccgaggaggaggtcgatgagatgatccgggaggccgacgtggacggtgatggccaggtcaactacgaggagttcgtgcgcatgatgacgtctggcgccactgacgacaaggacaagaagggccacaagtaa

SEQ ID NO: 3699 - protein, 163 aa, Chlamydomonas reinhardtii
MAANTEQLTEEQIAEFKEAFALFDKDGDGTITTKELGTVMRSLGQNPTEAELQDMISEVDADGNGTIDFPEFLMLMARKMKETDHEDELREAFKVFDKDGNGFISAAELRHVMTNLGEKLSEEEVDEMIREADVDGDGQVNYEEFVRMMTSGATDDKDKKGHK

SEQ ID NO: 3700 - DNA, 450 bp, Ciona intestinalis
  CDS (1)..(450)
atggctgatcaactcacagaagagcaaattgctgaattcaaggaagcgttctcccttttcgacaaggacggcgatggtacaatcaccaccaaggagctgggaaccgttatgaggtctttgggacaaaacccaactgaagctgagcttcaggacatgatcaatgaagttgatgctgacggcaacggaaccatcgattttcccgagtttttgacaatgatggcccgaaaaatgaaggacaccgacagtgaagaagaaattagagaagcattcagggttttcgataaggacggcaatggcttcatctcagccgctgagctgcgtcatgttatgaccaatcttggtgaaaagctaacggacgaagaagttgatgaaatgatcagagaagctgatgttgacggagatggccaagtcaactatgaagagtttgtgaacatgatgacaaacaagtga

SEQ ID NO: 3701 - protein, 149 aa, Ciona intestinalis
MADQLTEEQIAEFKEAFSLFDKDGDGTITTKELGTVMRSLGQNPTEAELQDMINEVDADGNGTIDFPEFLTMMARKMKDTDSEEEIREAFRVFDKDGNGFISAAELRHVMTNLGEKLTDEEVDEMIREADVDGDGQVNYEEFVNMMTNK

SEQ ID NO: 3702 - DNA, 450 bp, Colletotrichum gloeosporioides
  CDS (1)..(450)
atggccgactctctgaccgaagagcaagtctccgagttcaaggaggccttctccctctttgacaaggatggcgatggtcaaatcactaccaaggagctgggcaccgtcatgcgctctctcggccagaacccctccgagtcggagctccaggacatgatcaacgaggtcgacgccgacaacaatggcaccatcgactttcccgagttcctgacgatgatggcccgcaagatgaaggataccgactccgaagaggaaattcgcgaggctttcaaggtctttgaccgcgacaacaacggcttcatctctgccgccgagctgcgtcacgtcatgacctccattggtgagaagcttaccgacgacgaagttgacgagatgattcgcgaggccgatcaggacggcgatggacgcatcgactacaacgagttcgtccagctcatgatgcaaaagtaa

SEQ ID NO: 3703 - protein, 149 aa, Colletotrichum gloeosporioides
MADSLTEEQVSEFKEAFSLFDKDGDGQITTKELGTVMRSLGQNPSESELQDMINEVDADNNGTIDFPEFLTMMARKMKDTDSEEEIREAFKVFDRDNNGFISAAELRHVMTSIGEKLTDDEVDEMIREADQDGDGRIDYNEFVQLMMQK

SEQ ID NO: 3704 - DNA, 447 bp, Fagus sylvatica
  CDS (1)..(447)
atggcagaccaactcaccgacgaccagatctctgagttcaaggaggccttcagcttgttcgacaaggatggcgacggttgcatcactacgaaggaacttggcactgtgatgaggtctctgggccagaacccaactgaggcagagctgcaggacatgatcaacgaagttgatcgtgatggtaatggaactattgacttccctgagttcctaaacctgatggctaggaagatgaaggacactgattcggaggaggaacttaaagaagcattccgggtttttgacaaggatcagaatggtttcatctctgctgctgagctgcgccatgtgatgaccaacctcggtgagaagctaaccgatgaagttgatgagatgatcagggaggctgatgttgatggtgatggccagataaattacgaggagtttgtcaaggtgatgatggctaagtga

SEQ ID NO: 3705 - protein, 148 aa, Fagus sylvatica
MADQLTDDQISEFKEAFSLFDKDGDGCITTKELGTVMRSLGQNPTEAELQDMINEVDRDGNGTIDFPEFLNLMARKMKDTDSEEELKEAFRVFDKDQNGFISAAELRHVMTNLGEKLTDEVDEMIREADVDGDGQINYEEFVKVMMAK

SEQ ID NO: 3706 - DNA, 450 bp, Helianthus annuus
  CDS (1)..(450)
atggcggatcagcttacagaagatcagatctctgaattcaaggaggctttcagcctcttcgacaaggacggcgatggttgtatcaccaccaaggaacttggaactgtgatgagatctcttgggcaaaacccgaccgaagctgagcttcaagatatgatcaatgaggtggatgctgatgggaacgggacgattgatttcccggagtttcttaacctgatggcacgtaagatgaaggacactgattctgaggaagagctcaaggaagctttcagggtgtttgataaggatcaaaacggtttcatttctgcggctgagttgcgtcatgtcatgactaatcttggtgagaagctgacagatgaggaagtcgatgagatgattcgcgaggctgatgtggacggtgatggccagatcaactatgaggagtttgttaaagtcatgatggccaagtaa

SEQ ID NO: 3707 - protein, 149 aa, Helianthus annuus
MADQLTEDQISEFKEAFSLFDKDGDGCITTKELGTVMRSLGQNPTEAELQDMINEVDADGNGTIDFPEFLNLMARKMKDTDSEEELKEAFRVFDKDQNGFISAAELRHVMTNLGEKLTDEEVDEMIREADVDGDGQINYEEFVKVMMAK

SEQ ID NO: 3708 - DNA, 444 bp, Kluyveromyces lactis
  CDS (1)..(444)
atgtcgcagaatttaacagaggaacaaattgcagaattcaaagaggcatttgccttgttcgataaggataatagcggctccatttctgctagtgagttggctaccgtgatgagatctttgggtctttcgcccagtgaagccgaagttgctgacttgatgaacgaaattgatgttgatggtaaccatgccattgaattcagtgagtttttagcgttaatgtccagacaattgaagtgtaacgattcggaacaagagttgttggaagctttcaaggtgtttgataagaacggggatggtttgatctctgctgcagagttgaaacatgttttgacgtcgattggtgaaaaattgaccgatgcggaagtcgatgaaatgttgagagaagttagcgatggctcgggtgaaattaacatcaaacaatttgctgcccttctatccaaatag

SEQ ID NO: 3709 - protein, 147 aa, Kluyveromyces lactis
MSQNLTEEQIAEFKEAFALFDKDNSGSISASELATVMRSLGLSPSEAEVADLMNEIDVDGNHAIEFSEFLALMSRQLKCNDSEQELLEAFKVFDKNGDGLISAAELKHVLTSIGEKLTDAEVDEMLREVSDGSGEINIKQFAALLSK

SEQ ID NO: 3710 - DNA, 450 bp, Lumbricus rubellus
  CDS (1)..(450)
atggctgaccaactgactgaagaacagattgctgaattcaaagaggcattctcactgttcgataaggatggcgatggcaccatcaccaccaaggaactgggaacggtgatgaggtcgctaggtcagaacccaacggaggctgaacttcaggatatgatcaatgaagttgatgctgatggcaatggaaccatcgacttccctgagttcctgacgatgatggccagaaagatgaaggacactgattccgaagaagagatccgagaggcgtttcgagtgttcgacaaggacggcaacggcttcatatctgcggctgagctgagacacgtcatgaccaaccttggcgagaagctgacggacgaggaggtcgacgagatgatcagggaagctgacattgacggtgacggtcaagtgaactacgaagagttcgtaacaatgatgatgagcaaataa

SEQ ID NO: 3711 - protein, 149 aa, Lumbricus rubellus
MADQLTEEQIAEFKEAFSLFDKDGDGTITTKELGTVMRSLGQNPTEAELQDMINEVDADGNGTIDFPEFLTMMARKMKDTDSEEEIREAFRVFDKDGNGFISAAELRHVMTNLGEKLTDEEVDEMIREADIDGDGQVNYEEFVTMMMSK

SEQ ID NO: 3712 - DNA, 450 bp, Zea mays
  CDS (1)..(450)
atggcggaccagctcaccgacgagcagatcgcggagttcaaggaggccttcagcctcttcgataaggatggcgacggctgcatcactaccaaggagcttggaacggtgatgcgctcccttggccagaaccctaccgaggcagagctgcaggacatgatcaacgaggtcgatgcggatggcaatgggaccatcgacttcccggagctcctgaacctgatggcgaggaagatgaaggacacggactcagaggaggagctcaaggaggccttccgcgtcttcgacaaggaccagaacggtttcatctcggctgccgagctccgccatgtcatgaccaaccttggcgagaagctgaccgacgaggaggtcgacgagatgatccgtgaggccgacgtcgacggcgacggccagatcaactacgaggagttcgtcaaggttatgatggccaagtga

SEQ ID NO: 3713 - protein, 149 aa, Zea mays
MADQLTDEQIAEFKEAFSLFDKDGDGCITTKELGTVMRSLGQNPTEAELQDMINEVDADGNGTIDFPELLNLMARKMKDTDSEEELKEAFRVFDKDQNGFISAAELRHVMTNLGEKLTDEEVDEMIREADVDGDGQINYEEFVKVMMAK

SEQ ID NO: 3714 - DNA, 450 bp, Malus domestica
  CDS (1)..(450)
atggcggatcagctgactgacgatcagatctctgagttcaaggaggccttcagccttttcgacaaggatggcgatggttgtatcaccacaaaggagcttggcactgtcatgagatcattggggcagaacccgactgaggctgagctccaggacatgatcaatgaagtcgatgctgatggtaatgggaccattgactttcctgagcctttaaacctcatggccaggaagatgaaggacactgactctgaggaggagctgaaagaggctttcagagtttttgacaaggatcagaatggcttcatttccgccgcggagctccgccatgtgatgaccaatcttggggaaaagctcactgatgaggaagttgatgagatgatccgggaggctgatgttgatggcgatggccagataaattacgaggagtttgtcaaggtgatgatggccaagtga

SEQ ID NO: 3715 - protein, 149 aa, Malus domestica
MADQLTDDQISEFKEAFSLFDKDGDGCITTKELGTVMRSLGQNPTEAELQDMINEVDADGNGTIDFPEPLNLMARKMKDTDSEEELKEAFRVFDKDQNGFISAAELRHVMTNLGEKLTDEEVDEMIREADVDGDGQINYEEFVKVMMAK

SEQ ID NO: 3716 - DNA, 450 bp, Mougeotia scalaris
  CDS (1)..(450)
atggccgaccagttgacagaggagcagattgcagagtttaaggaagctttcagtctattcgacaaagatggtgacggtagcatcactaccaaggaacttggtacggtgatgagatccttgggacagaacccgactgaagctgaactccaagacatgatcaacgaagtggatgcagatggaaacggaaccatcgattttcctgagtttctcaatctgatggctaggaaaatgaaggatactgattctgaagaggaactgaaagaagctttcaaagtatttgacaaggatcaaaatggctacatttctgctgctgactggcgccatgtcatgacaaatcttggggagaaactgacagatgaggaggtagatgaaatgattcgtgaagctgatgtagacggcgacggtcaggtcaactatgaagagtttgtcaaaatgatgatggctaagtag

SEQ ID NO: 3717 - protein, 149 aa, Mougeotia scalaris
MADQLTEEQIAEFKEAFSLFDKDGDGSITTKELGTVMRSLGQNPTEAELQDMINEVDADGNGTIDFPEFLNLMARKMKDTDSEEELKEAFKVFDKDQNGYISAADWRHVMTNLGEKLTDEEVDEMIREADVDGDGQVNYEEFVKMMMAK

SEQ ID NO: 3718 - DNA, 450 bp, Myxine glutinosa
  CDS (1)..(450)
atggcggaccaactcaccgaagagcaaattgcagagttcaaggaagccttctcgctgtttgacaaggacggtgatggaaccatcacaacaaaagaactgggaacggtcatgaggtcattgggtcagaatcccaccgaggcagagctacaggatatgatcaacgaagtcaatgcggatggtaatggcaccattgacttccccgagtttctgaccatgatggcacggaagatgaaggatacggacagtgaggaggagatccgagaggctttcagggtgtttgacaaggacgggaatggttacatcagtgcagcagagctacggcatgtcatgaccaaccttggggaaaaactcacggacgaggaggttgacgagatgatccgagaggcggacatcgacggagatggacaggtcaattatgaagagtttgtacagatgatgaccgcaaagtaa

SEQ ID NO: 3719 - protein, 149 aa, Myxine glutinosa
MADQLTEEQIAEFKEAFSLFDKDGDGTITTKELGTVMRSLGQNPTEAELQDMINEVNADGNGTIDFPEFLTMMARKMKDTDSEEEIREAFRVFDKDGNGYISAAELRHVMTNLGEKLTDEEVDEMIREADIDGDGQVNYEEFVQMMTAK

SEQ ID NO: 3720 - DNA, 450 bp, Paxillus involutus
  CDS (1)..(450)
atggcggatcaactgtctgaagagcaaatatctgaattcaaggaagccttctctctctttgacaaagatggcgatggcacgatcaccaccaaggagcttggcactgtgatgcgctcgctagggcagaaccccaccgaaggagagctacaagacatgatcaacgaagtcgatgcagacggaaacggcacgattgatttccctgagttcttgaccatgatggcgcgcaagatgcgcgacacggacagtgaagaagaaatcaaggaggcatttaaagtgttcgacaaggacggaaatggctacattagcgccgcagagttgcgacatgtcatgacgaaccttggagagaaattgaccgatacagaggttgacgagatgatccgcgaggcggatgttgatggtgatggccaaatcaactacgacgagttcgtcaagatgatgttatcgaagtga

SEQ ID NO: 3721 - protein, 149 aa, Paxillus involutus
MADQLSEEQISEFKEAFSLFDKDGDGTITTKELGTVMRSLGQNPTEGELQDMINEVDADGNGTIDFPEFLTMMARKMRDTDSEEEIKEAFKVFDKDGNGYISAAELRHVMTNLGEKLTDTEVDEMIREADVDGDGQINYDEFVKMMLSK

SEQ ID NO: 3722 - DNA, 450 bp, Pleurotus ostreatus
  CDS (1)..(450)
atggccgaccaactgtccgaagaacaaatctctgaattcaaggaggccttctcacttttcgataaagacggagatggcaccatcaccaccaaagagctcggaaccgtcatgcgctcactggggcagaaccccaccgaagccgaattgcaggacatgatcaacgaagttgacgcagacggcaacggcacgattgatttccctgaattcctcacaatgatggcgcgaaagatgcgtgacacggacagcgaggaggagatcaaggaggcgttcaaggtgtttgataaggatgggaacgggtacatcagcgctgctgagctcaggcatgttatgacaaatttgggcgagaagttgaccgataatgaggtggatgagatgatccgtgaagctgatgttgacggcgatgggcaaattaactacgaagaattcgtcaagatgatgctctcgaagtaa

SEQ ID NO: 3723 - protein, 149 aa, Pleurotus ostreatus
MADQLSEEQISEFKEAFSLFDKDGDGTITTKELGTVMRSLGQNPTEAELQDMINEVDADGNGTIDFPEFLTMMARKMRDTDSEEEIKEAFKVFDKDGNGYISAAELRHVMTNLGEKLTDNEVDEMIREADVDGDGQINYEEFVKMMLSK

SEQ ID NO: 3724 - DNA, 456 bp, Pneumocystis carinii
  CDS (1)..(456)
atgagtaatgaacagaatttaacagaagaacagatttcagagtttaaggaagctttttcattatttgataaggatggggatggctctattacaacgaaagagcttggaattgttatgcggtcattaggtcagaatccaacagaagcagaattacaagatatggtgaacgaagttgatgcagatgggaatggaacaattgattttcctgaatttctggcaatgatggcacgaaaaatgaaagatgtcgattctgaagaagaaattcgggaagcatttaaagtatttgataaagatggtaacggaattatttctgcagcagagttgagacatgttatgacaaatttgggggagaagttgacagatgaggaagttgatgaaatgattcgagaagctgatgtagatggtgatggagttattgattatagtgaatttgttaagatgatgttaagtaaataa

SEQ ID NO: 3725 - protein, 151 aa, Pneumocystis carinii
MSNEQNLTEEQISEFKEAFSLFDKDGDGSITTKELGIVMRSLGQNPTEAELQDMVNEVDADGNGTIDFPEFLAMMARKMKDVDSEEEIREAFKVFDKDGNGIISAAELRHVMTNLGEKLTDEEVDEMIREADVDGDGVIDYSEFVKMMLSK

SEQ ID NO: 3726 - DNA, 453 bp, Schizosaccharomyces pombe
  CDS (1)..(453)
atgactacccgtaaccttacagatgagcagattgcagaattccgtgaagccttttcactgtttgatcgtgatcaggatggaaatatcacgtccaatgaattgggtgtagttatgagatcgttaggtcaatcgcctactgccgccgaattacaagatatgattaatgaggtcgatgccgatggtaatggcacaattgattttaccgaatttttgactatgatggcccgaaaaatgaaggataccgacaacgaagaggaagttcgcgaagcctttaaagtcttcgataaagatggaaatggatacattacagtcgaggagttgactcatgtgcttacaagtcttggtgaacgtttgtctcaagaagaagtagccgatatgatacgtgaagccgacaccgatggcgatggtgtaatcaactacgaagaattctctcgtgtcatttcttccaagtag

SEQ ID NO: 3727 - protein, 150 aa, Schizosaccharomyces pombe
MTTRNLTDEQIAEFREAFSLFDRDQDGNITSNELGVVMRSLGQSPTAAELQDMINEVDADGNGTIDFTEFLTMMARKMKDTDNEEEVREAFKVFDKDGNGYITVEELTHVLTSLGERLSQEEVADMIREADTDGDGVINYEEFSRVISSK

SEQ ID NO: 3728 - DNA, 450 bp, Solanum lycopersicum
  CDS (1)..(450)
atggcagagcagctgacggaggagcagatcgctgagttcaaggaagcttttagccttttcgacaaggatggcgatggctgtattactaccaaggagttgggaacagtgatgagatcacttggtcagaatcccactgaagctgaactacaggatatgatcagtgaagttgatgctgatcagaatggaaccattgattttccagagttcttgaatctgatggcacggaagatgaaggacactgattctgaggaagaactcaaagaggcttttaaggtttttgataaagatcagaatggctttatttctgcagctgagcttcgtcatgtaatgacaaaccttggagagaagctgactgatgaagaggtggatgagatgatccgagaggcagatattgatggtgatggacaagttaattatgaggagtttgtccgtatgatgcttgccaagtga

SEQ ID NO: 3729 - protein, 149 aa, Solanum lycopersicum
MAEQLTEEQIAEFKEAFSLFDKDGDGCITTKELGTVMRSLGQNPTEAELQDMISEVDADQNGTIDFPEFLNLMARKMKDTDSEEELKEAFKVFDKDQNGFISAAELRHVMTNLGEKLTDEEVDEMIREADIDGDGQVNYEEFVRMMLAK

SEQ ID NO: 3730 - DNA, 471 bp, Strongylocentrotus intermedius
  CDS (1)..(471)
atgtcccaggaactcaccattaatgccgatcagcttactgaggagcagattgcagagttcaaggaggctttctccctcttcgataaggatggcgacggcaccatcaccaccaaggagttgggcaccgtgatgcgatcactgggtcagaaccctactgaggctgagcttcaagacatgatcaatgaagtagacgctgacggaaacggaacgattgatttcccagagttcttgacgatgatggccaggaagatgaaggacacagacagtgaggaagagatcagggaagctttccgtgtcttcgacaaggacggcaacggattcatcagcgctgctgaacttcgtcatgtgatgacaaaccttggtgagaaactgacagatgaggaggtagatgagatgatcagggaagctgatatcgatggtgatggacaggtcaactacgaagaattcgtgacgatgatgacatcgaagtga

SEQ ID NO: 3731 - protein, 156 aa, Strongylocentrotus intermedius
MSQELTINADQLTEEQIAEFKEAFSLFDKDGDGTITTKELGTVMRSLGQNPTEAELQDMINEVDADGNGTIDFPEFLTMMARKMKDTDSEEEIREAFRVFDKDGNGFISAAELRHVMTNLGEKLTDEEVDEMIREADIDGDGQVNYEEFVTMMTSK

SEQ ID NO: 3732 - DNA, 432 bp, Schizosaccharomyces pombe
  CDS (1)..(432)
atgcctgcctccaaagaacaaaccgatgaaatgaaagaggcatttgtcctttatgatatcgacaaagacggtttgattcctacgagtcatgtgggttccgttttgagaagtctcggaatcaatgttactgatgccgaattagcaaagctttctaatgaattaggcgatgccattgatgaaaaaaaatttatgagctttgtttccaacaaattaagggaaacagaatcagaggaagaatatataaaagcatttagagttttcgacaaggacaatagtggttatatcgaaaccgctaaatttgccgattatatgaaaacgttaggtgagaagctttcagataacgaagtacaattgatggtgcaagaggccgatcctactaattctggaagctttgactattatgactttgtacagagaatcatggcaaaatag

SEQ ID NO: 3733 - protein, 143 aa, Schizosaccharomyces pombe
MPASKEQTDEMKEAFVLYDIDKDGLIPTSHVGSVLRSLGINVTDAELAKLSNELGDAIDEKKFMSFVSNKLRETESEEEYIKAFRVFDKDNSGYIETAKFADYMKTLGEKLSDNEVQLMVQEADPTNSGSFDYYDFVQRIMAK

SEQ ID NO: 3734 - DNA, 486 bp, Saccharomyces cerevisiae
  CDS (1)..(486)
atgagtaagaacaggtcatcgctacagtctggtccacttaatagcgagttattggaggagcaaaagcaagaaatatatgaggcgttttcattgttcgatatgaacaatgatgggttcctcgattaccacgagttgaaagtagcaatgaaggccctgggatttgagctacccaagagagaaatacttgacttaatagatgaatatgatagtgaggggcggcatttgatgaagtatgatgatttttatattgtaatgggggaaaaaatattgaagagagatccgttagatgaaataaaaagggcattccaattatttgatgacgaccatactgggaaaataagtattaaaaacttgaggcgtgtagctaaagaattaggagaaactttgacggatgaagagctgagagcgatgattgaagagtttgatttggatggtgatggcgagattaatgaaaacgaatttatagctatttgcaccgatagttaa

SEQ ID NO: 3735 - protein, 161 aa, Saccharomyces cerevisiae
MSKNRSSLQSGPLNSELLEEQKQEIYEAFSLFDMNNDGFLDYHELKVAMKALGFELPKREILDLIDEYDSEGRHLMKYDDFYIVMGEKILKRDPLDEIKRAFQLFDDDHTGKISIKNLRRVAKELGETLTDEELRAMIEEFDLDGDGEINENEFIAICTDS

SEQ ID NO: 3736 - DNA, 522 bp, Arabidopsis thaliana
  CDS (1)..(522)
atggaagaaattcaacaacaacaacaacaacaacaacaacaacaacaacaacaacaacaacaacaacaacaacaacaagaactgacgcaagaacagataatggagttcaaagaggctttttgtctattcgacaaagatggtgatggatgcatcactgctgatgaacttgccactgtgatccgctcattggatcagaaccctaccgagcaagaacttcaagatatgatcactgagatcgactccgatggcaacggcaccatcgaattttcggagtttctcaacctcatggctaaccaactccaggaaactgatgcagatgaagagctgaaagaagcattcaaagtgtttgacaaagaccaaaatggttacatctctgccagtgagttgaggcatgtgatgattaatcttggggagaagctaacagatgaagaggttgatcaaatgataaaagaggcagatttggatggtgatggccaagtcaattatgatgaatttgtcaggatgatgatgatcaatggttaa

SEQ ID NO: 3737 - protein, 173 aa, Arabidopsis thaliana
MEEIQQQQQQQQQQQQQQQQQQQQQQELTQEQIMEFKEAFCLFDKDGDGCITADELATVIRSLDQNPTEQELQDMITEIDSDGNGTIEFSEFLNLMANQLQETDADEELKEAFKVFDKDQNGYISASELRHVMINLGEKLTDEEVDQMIKEADLDGDGQVNYDEFVRMMMING

SEQ ID NO: 3738 - DNA, 564 bp, Oryza sativa subsp. indica
  CDS (1)..(564)
atggcggaccagctctccgaagagcagattgtagagttcagggaggccttcagcctcttcgacaaggacggcgacggttctatcaccaccaaggagctaggaaccgtgatgcgaagtctggggcagaacccaacagaggcggagctgcaggacatgatcagcgaggtggacgcggacagcaacggcaacatcgaattcaaggagttcctgggcctgatggcgcgcaagctgagggacaaggactccgaggaggagctgaaggaggcgttccgcgtcttcgacaaggaccagaacggcttcatctccgccgccgagctccgccacgtgatggccaacatcggggagcggctcaccgacgaggaggtcggcgagatgatcagcgaggccgacgtcgacggcgacgggcagatcaactacgaggagttcgtcaagtgcatgatggccaagaagaggaggaagaggatagaggagaagagggagcacgacggcggcagcaggacgaagagtgcagggccctccgccgcgccggcgagcaagcgtggccagaagtgcgtgatcctgtaa

SEQ ID NO: 3739 - protein, 187 aa, Oryza sativa subsp. indica
MADQLSEEQIVEFREAFSLFDKDGDGSITTKELGTVMRSLGQNPTEAELQDMISEVDADSNGNIEFKEFLGLMARKLRDKDSEEELKEAFRVFDKDQNGFISAAELRHVMANIGERLTDEEVGEMISEADVDGDGQINYEEFVKCMMAKKRRKRIEEKREHDGGSRTKSAGPSAAPASKRGQKCVIL

SEQ ID NO: 3740 - DNA, 456 bp, Arabidopsis thaliana
  CDS (1)..(456)
atggaagaaacagcactgacaaaagatcagatcactgagttcaaagaagccttttgtctcttcgacaaagacggcgacggttgtataacggtggaagaacttgcaacagtgatccgttcgttggatcagaatccgacagaacaagaacttcatgatatcatcactgagattgattctgatagcaacggcaccattgaatttgctgagtttctcaacctcatggccaaaaaacttcaggaaagtgatgcggaggaagagctgaaagaagcattcaaagtctttgacaaagaccaaaatggatacatctctgccagtgagttgagtcatgtaatgataaatctaggagaaaagctaacagatgaagaagttgaacaaatgataaaggaggcagatttggatggtgatggccaagtcaattatgatgaatttgtcaagatgatgatcaacattgactga

SEQ ID NO: 3741 - protein, 151 aa, Arabidopsis thaliana
MEETALTKDQITEFKEAFCLFDKDGDGCITVEELATVIRSLDQNPTEQELHDIITEIDSDSNGTIEFAEFLNLMAKKLQESDAEEELKEAFKVFDKDQNGYISASELSHVMINLGEKLTDEEVEQMIKEADLDGDGQVNYDEFVKMMINID

SEQ ID NO: 3742 - DNA, 450 bp, Oryza sativa
  CDS (1)..(450)
atggcggaccagctcaccgacgaccagatcgccgagttcaaggaggccttcagcctcttcgacaaggacggcgacggttgtattactactaaggagttgggaactgtcatgcgttcgctggggcagaacccaactgaggcagaactacaagacatgatcaatgaggtggatgctgacggcaatggaacaatcgatttccctgaatttctcaacctgatggcccgcaagatgaaagatactgattctgaggaagagctcaaggaggcgttccgtgtgttcgacaaggaccaaaatggttttatctctgctgctgaattgcgtcacgtcatgactaaccttggtgagaagctgacagatgaggaggttgaagagatgatccgtgaggccgatgttgatggtgatgggcagatcaactacgatgaattcgttaaagtcatgatggccaagtaa

SEQ ID NO: 3743 - protein, 149 aa, Oryza sativa
MADQLTDDQIAEFKEAFSLFDKDGDGCITTKELGTVMRSLGQNPTEAELQDMINEVDADGNGTIDFPEFLNLMARKMKDTDSEEELKEAFRVFDKDQNGFISAAELRHVMTNLGEKLTDEEVEEMIREADVDGDGQINYDEFVKVMMAK

SEQ ID NO: 3744 - DNA, 636 bp, Oryza sativa
  CDS (1)..(636)
atgagcgagccggccaccaccacccccacccccacccccgccggagaccacgacgcagccgccaccgcatgcaagcctgcggagacgaccacggccctgatcacctgcaggagcagcagctgcagcgcccagcagcagcagcagcagcagcagcagcaggaggagccgctcggcgacgaccagctgggtgagctgcgggagatcttccgctccttcgaccgcaacggcgacggcagcctgacgcagctggagctcgggtccctcctccgctccctcggcctcaagcccagcaccgacgagctggactccctcatccagcgcgccgacaccaactccaacggcctcatcgagttctccgagttcgtcgccctcgtcgcgcccgagctcctctacgaccgcgccccctactccgaggaccagatccgccgcctcttcaacatcttcgaccgcgacggcaacggcttcatcaccgccgccgagctcgcccactccatggccaagctcggccacgcgctcaccgtcaaggagctcaccggcatgatcaaggaagccgacaccgacggcgacggccgcatcagcttccaggaattctcccgcgccatcaccgccgccgcatttgacaacatcttctcctga

SEQ ID NO: 3745 - protein, 211 aa, Oryza sativa
MSEPATTTPTPTPAGDHDAAATACKPAETTTALITCRSSSCSAQQQQQQQQQQEEPLGDDQLGELREIFRSFDRNGDGSLTQLELGSLLRSLGLKPSTDELDSLIQRADTNSNGLIEFSEFVALVAPELLYDRAPYSEDQIRRLFNIFDRDGNGFITAAELAHSMAKLGHALTVKELTGMIKEADTDGDGRISFQEFSRAITAAAFDNIFS

SEQ ID NO: 3746 - DNA, 564 bp, Oryza sativa
  CDS (1)..(564)
atggcggaccagctctccgaagagcagattggagagttcagggaggccttcagcctcttcgacaaggacggcgacggttctatcaccaccaaggagctaggaaccgtgatgcgaagtctagggcagaacccaacggaggcggagctgcaggacatgatcagcgaggtggacacggacagcaacggcaacatcgaattcaaggagttcctgggcctgatggcgcgcaagctgagggacaaggactccgaggaggagctgaaggaggcattccgcgtcttcgacaaggaccagaacggtttcatctctgccaccgagctccgccacgtgatggccaacatcggggagcggctcaccgacgaggaggtcggcgagatgatcagcgaggccgacgtcgacggcgacgggcagatcaactacgaggagttcgtcaagtgcatgatggccaagaagaggaggaagaggatagaggagaagagggaccacgacggcggcagcaggacgaagagtgcagggccctccgccgcgccggcgagcaagcgtggccagaagtgcgtgatcctgtaa

SEQ ID NO: 3747 - protein, 187 aa, Oryza sativa
MADQLSEEQIGEFREAFSLFDKDGDGSITTKELGTVMRSLGQNPTEAELQDMISEVDTDSNGNIEFKEFLGLMARKLRDKDSEEELKEAFRVFDKDQNGFISATELRHVMANIGERLTDEEVGEMISEADVDGDGQINYEEFVKCMMAKKRRKRIEEKRDHDGGSRTKSAGPSAAPASKRGQKCVIL

SEQ ID NO: 3748 - DNA, 450 bp, Oryza sativa
  CDS (1)..(450)
atggcggaccagctctccgaagagcagattggagagttcagggaggccttcagcctcttcgacaaggacggcgacggttctatcaccaccaaggagctaggaaccgtgatgcgaagtctagggcagaacccaacggaggcggagctgcaggacatgatcagcgaggtggacacggacagcaacggcaacatcgaattcaaggagttcctgggcctgatggcgcgcaagctgagggacaaggactccgaggaggagctgaaggaggcattccgcgtcttcgacaaggaccagaacggtttcatctctgccaccgagctccgccacgtgatggccaacatcggggagcggctcaccgacgaggaggtcggcgagatgatcagcgaggccgacgtcgacggcgacgggcagatcaactacgaggagttcgtcaagtgcatgatggccaagtga

SEQ ID NO: 3749 - protein, 149 aa, Oryza sativa
MADQLSEEQIGEFREAFSLFDKDGDGSITTKELGTVMRSLGQNPTEAELQDMISEVDTDSNGNIEFKEFLGLMARKLRDKDSEEELKEAFRVFDKDQNGFISATELRHVMANIGERLTDEEVGEMISEADVDGDGQINYEEFVKCMMAK

SEQ ID NO: 3750 - DNA, 558 bp, Oryza sativa
  CDS (1)..(558)
atggtcaagatcaagatgcccgccctgttccgccgccggagcggctccaagtcgccgccgctgccgcaggccgaccccgcgtccggcggcgggtccccggcgccgacgccggaggaggagatggagcgggtgttccgcaagttcgacgccaacggcgacggccggatctcgcggtccgagctcggcgcgctgttcgagagcctcgggcacgcggccaccgacgacgagctcgcccgcatgatggccgaggcggacgccgacggcgacggcttcatcagcctcgacgagttcgccgccctcaacgccaccgccagcggcgacgcggccgccgtcgaggaggacctccgccacgccttccgcgtcttcgacgccgacggcaacggcaccatctccgccgccgagctcgcccgcgtcctccacggcctcggcgagaaggccaccgtccagcagtgccgccgcatgatcgagggcgtcgaccagaacggcgacggcctcatctccttcgaggaattcaaggtcatgatggccggaggcggctccttcgccaagatcgcctag

SEQ ID NO: 3751 - protein, 185 aa, Oryza sativa
MVKIKMPALFRRRSGSKSPPLPQADPASGGGSPAPTPEEEMERVFRKFDANGDGRISRSELGALFESLGHAATDDELARMMAEADADGDGFISLDEFAALNATASGDAAAVEEDLRHAFRVFDADGNGTISAAELARVLHGLGEKATVQQCRRMIEGVDQNGDGLISFEEFKVMMAGGGSFAKIA

SEQ ID NO: 3752 - DNA, 456 bp, Oryza sativa
  CDS (1)..(456)
atggttgcctccgacgagttcaggcgcgtctttggatcgttcgaccaggacggcgacggcaagatctccgccaccgagctgcggctctgcgtgaaggcgtccctcggcgaggacatgccggacgaggaggtgcaggcgctcatggcgttggcggacaccgacggcgacgggttgctggacgaagaggagttcgtgaggctggtgacagaaatggaggcggatggtgatgaggaagaagacgacgacgacgagacgtgcaggtgcctaagggaggcgtttgcgatgtacgagatggaagggagaggatgcatcacgccgctgagcctgaagctgatgctgagcaagctgggcacgcacctggacgttgcagagtgccaggccatgatctgcaggttcgacatgaacggagacggggtgctcaccttcgacgagttcaagactatgatgatggcctga

SEQ ID NO: 3753 - protein, 151 aa, Oryza sativa
MVASDEFRRVFGSFDQDGDGKISATELRLCVKASLGEDMPDEEVQALMALADTDGDGLLDEEEFVRLVTEMEADGDEEEDDDDETCRCLREAFAMYEMEGRGCITPLSLKLMLSKLGTHLDVAECQAMICRFDMNGDGVLTFDEFKTMMMA

SEQ ID NO: 3754 - DNA, 441 bp, Oryza sativa
  CDS (1)..(441)
atggtggccgcgacagccgagttcaggcgagtgttctccgcgttcgaccgcgacgccgacggcaagatctcggcggcggagctgcggctctgcatgaaggccgcgctcggcgaggacatgtccgccgaggaggccgaggcgctcgtctcgtcggcggacaccgacgacgacgggctgctcgacgaggaggagttcacgaagctggcggtgcagcttgagatgggagacgaggaggagaggtgcaggggactaatggaggcgttccggatgtacgagatggaaggggaggggcgcatcactccggcgagcttgaaacggatgctgagcaagctcggatcgcatcagggcatcgaggagtgccaaacaatgatctgcaggtttgacctcgatggagatggagtcatcagctttgaggagttcaagatcatgatggatgcatag

SEQ ID NO: 3755 - protein, 146 aa, Oryza sativa
MVAATAEFRRVFSAFDRDADGKISAAELRLCMKAALGEDMSAEEAEALVSSADTDDDGLLDEEEFTKLAVQLEMGDEEERCRGLMEAFRMYEMEGEGRITPASLKRMLSKLGSHQGIEECQTMICRFDLDGDGVISFEEFKIMMDA

SEQ ID NO: 3756 - DNA, 495 bp, Oryza sativa
  CDS (1)..(495)
atggcgtgcgaccagcaggcggagctccggcgggtgttcgagctgttcgaccgtgacggcgacggccggatcacccgggaggagctgacggagtcgctggagaggctcgggatgcccgtgcacagggaggagctcgccgccaccatcgcccgcatcgacgccaacggcgacgggtgcgtcgacatggacgagttcacccagctgtacgagaccgtcatgcgcgtcgacggcggcggcggcggcggcggcggcgcctgcgacgtggatgaggcgagcatgcgcgaggcgttcgacgtgttcgaccggaacggcgacgggttcatcaccgtggacgagctgggcgccgtgctggcgtcgctggggatcaagcagggccggacggcggaggactgcggccgcatgatcggccaggtcgacagggacggcgacggccgcgtcgacttcctcgagttcaagcagatgatgcgcggcggcgcgttcgccacgctccggtga

SEQ ID NO: 3757 - protein, 164 aa, Oryza sativa
MACDQQAELRRVFELFDRDGDGRITREELTESLERLGMPVHREELAATIARIDANGDGCVDMDEFTQLYETVMRVDGGGGGGGGACDVDEASMREAFDVFDRNGDGFITVDELGAVLASLGIKQGRTAEDCGRMIGQVDRDGDGRVDFLEFKQMMRGGAFATLR

SEQ ID NO: 3758 - DNA, 465 bp, Oryza sativa
  CDS (1)..(465)
atggaagggctgacgagcgagcagatggtggcgttccaggaggcgttcttgctcttcgacaagaacggcgatggatgcatcaccttggaagagctggctgcggtgactcgttctcttggccttgagccgaccgatcaggagctcaacgacatgatgagggaagttgatacagatggcaatgggatcatagattttcaggagttcctgagcctcattgccaggaagatgaaggatggggatggcgacgaagagctgaaagaagctttcgaggtcctagacaaggatcagaatggttttatctccccaactgagctgaggacagtgatgaccaatcttggggagaagatgacagacgaggaggttgagcagatgataagggaggcggataccgatggcgacgggcaggtgaactacgatgaatttgtgataatgatgaaaaacgctgaacggaagatatctgggtga

SEQ ID NO: 3759 - protein, 154 aa, Oryza sativa
MEGLTSEQMVAFQEAFLLFDKNGDGCITLEELAAVTRSLGLEPTDQELNDMMREVDTDGNGIIDFQEFLSLIARKMKDGDGDEELKEAFEVLDKDQNGFISPTELRTVMTNLGEKMTDEEVEQMIREADTDGDGQVNYDEFVIMMKNAERKISG

SEQ ID NO: 3760 - DNA, 477 bp, Oryza sativa
  CDS (1)..(477)
atgccgatggcggagctggagcaggtgttccggcggtacgacgcgaacggcgacgggaagatctcggcggaggagctggcgtccgtgctgcgggcactgggggcgcccctcggtcccggcgaggtgcggcgcatgatggacgagatggactccgaccgcgacggcttcgtcgacctctccgagttcgccgccttccactgcggccccacgccggcgcacggcggcaagggcggcgacgccaaggaccaggaggccgcgtcggaggcggagctgagggaggcgttccggatgtacgacgccgacagcaacgggaagatctcggcgcgggagctccaccgcgtgctccgccagctcggcgacaagtgctccgtcgccgactgctcccggatgatccggtccgtcgacgccgacggcgatggctgcgtcaacttcgacgagttcaagaagatgatgggcggcggcggcggccggcggtag

SEQ ID NO: 3761 - protein, 158 aa, Oryza sativa
MPMAELEQVFRRYDANGDGKISAEELASVLRALGAPLGPGEVRRMMDEMDSDRDGFVDLSEFAAFHCGPTPAHGGKGGDAKDQEAASEAELREAFRMYDADSNGKISARELHRVLRQLGDKCSVADCSRMIRSVDADGDGCVNFDEFKKMMGGGGGRR

SEQ ID NO: 3762 - DNA, 450 bp, Oryza sativa
  CDS (1)..(450)
atggcggaccagctcaccgacgagcagatcgccgagttcaaggaggcgttcagcctcttcgacaaggacggcgacggttgcatcactactaaggagcttggaaccgtgatgcggtcccttggtcagaacccaactgaggcggagctgcaggacatgatcaacgaggttgatgctgatggcaatgggaccattgacttcccagagttcctgaacctgatggcgaagaagatgaaggataccgactctgaggaggagctcaaggaggccttccgtgtgtttgacaaggaccagaacggtttcatctcggctgctgagctccgccacgtcatgaccaaccttggtgagaagctgaccgacgaggaagtcgacgagatgatccgtgaggctgacgtcgatggcgatggccagatcaactacgaggagttcgttaaggtcatgatggccaagtga

SEQ ID NO: 3763 - protein, 149 aa, Oryza sativa
MADQLTDEQIAEFKEAFSLFDKDGDGCITTKELGTVMRSLGQNPTEAELQDMINEVDADGNGTIDFPEFLNLMAKKMKDTDSEEELKEAFRVFDKDQNGFISAAELRHVMTNLGEKLTDEEVDEMIREADVDGDGQINYEEFVKVMMAK

SEQ ID NO: 3764 - DNA, 522 bp, Oryza sativa
  CDS (1)..(522)
atgacaacaatggcggcgaggaggtcagaagcagcaccggctccgcagcagctgcgggggagccagctgaagcagctccgggagctgttccggcggttcgacatgaacggcgacggcagcctgacgcagctggagctggcggcgctgctgcggtcgctggggctgcgccccacgggcgacgaggtgcacgcgctgctcgccgggatggacgccaacggcaacgggtcggtggagttcgacgagctggcggcggcgatcgcgccggtgctcaccacgcagacgcacctggtggaccaggcgcagctgctcgaggtgttccgggcgttcgaccgcgacggcaacggcttcatctccgccgccgagctcgcccgctccatggcgcgcctcggccagccgctcaccttcgaggagctcacgcggatgatgcgcgacgccgacaccgacggcgacggggtcatcagcttcaaggagttcgccgccgtcatggccaagtccgcgcttgacttcctcggcgtcgcctga

SEQ ID NO: 3765 - protein, 173 aa, Oryza sativa
MTTMAARRSEAAPAPQQLRGSQLKQLRELFRRFDMNGDGSLTQLELAALLRSLGLRPTGDEVHALLAGMDANGNGSVEFDELAAAIAPVLTTQTHLVDQAQLLEVFRAFDRDGNGFISAAELARSMARLGQPLTFEELTRMMRDADTDGDGVISFKEFAAVMAKSALDFLGVA

SEQ ID NO: 3766 - DNA, 510 bp, Oryza sativa
  CDS (1)..(510)
atgtctactgtcaagggacagaccaggagggagaggcctagaggagctcgccctcatggattgacgaagcagaagaggcaggaaataaaggaggcgtttgatctgttcgacacagataactctggaaccattgatgccaaagagttgaatgttgccatgagagccttgggatttgagatgacagaagaacaaattaaccagatgattgctgatgtggacaaagatggtagtggatccatagattatgaggagtttgagcatatgatgactgctaagattggagagagagacagtaaagaagaacttacgaaagcattcagtattatcgaccaagataaaaatgggaagatatcagatgttgatattcagcgaattgccaaggaattaggtgaaaacttcacttatcaagagattcaagaaatggtgcaagaggcagatcgaaatggtgatggtgagatagattttgatgagttcattaggatgatgaggaggactggatatggttactag

SEQ ID NO: 3767 - protein, 169 aa, Oryza sativa
MSTVKGQTRRERPRGARPHGLTKQKRQEIKEAFDLFDTDNSGTIDAKELNVAMRALGFEMTEEQINQMIADVDKDGSGSIDYEEFEHMMTAKIGERDSKEELTKAFSIIDQDKNGKISDVDIQRIAKELGENFTYQEIQEMVQEADRNGDGEIDFDEFIRMMRRTGYGY

SEQ ID NO: 3768 - DNA, 450 bp, Oryza sativa
  CDS (1)..(450)
atggcggatcagctcaccgacgaccagatcgccgagttcaaggaggccttcagcctcttcgacaaggacggcgatggttgcatcacaaccaaggagttgggaactgtcatgcgttcactagggcagaacccaacggaagctgagctccaggacatgatcaacgaggttgatgctgatggcaatggaaccattgattttcctgagtttctcaatctgatggctcgcaagatgaaggacactgattcagaggaagaactcaaggaggccttccgggtgtttgacaaggaccaaaatggcttcatctccgctgctgagctccgccatgtgatgacaaatcttggcgagaagctaactgacgaggaggtggatgagatgatccgtgaggctgatgttgatggtgatggtcagataaactatgaggagtttgtgaaggtcatgatggccaagtga

SEQ ID NO: 3769 - protein, 149 aa, Oryza sativa
MADQLTDDQIAEFKEAFSLFDKDGDGCITTKELGTVMRSLGQNPTEAELQDMINEVDADGNGTIDFPEFLNLMARKMKDTDSEEELKEAFRVFDKDQNGFISAAELRHVMTNLGEKLTDEEVDEMIREADVDGDGQINYEEFVKVMMAK

SEQ ID NO: 3770 - DNA, 447 bp, Oryza sativa
  CDS (1)..(447)
atgggggggaaggagctgagcgaggagcaggtggcgtcgatgcgggaggcgttctccctcttcgacaccgacggcgacggccggatcgcgccgtcggagctcggcgtcctgatgcgctccctcggcgggaaccccacccaggcgcagctccgcgacatcgccgcgcaggagaagctcaccgcgcccttcgacttcccgcgcttcctcgacctcatgcgcgcccacctccgccccgagcccttcgaccgcccgctccgcgacgccttccgcgtcctcgacaaggacgcctccggcaccgtctccgtcgccgatctccgccacgtcctcacctccatcggcgagaagctcgagccccacgagttcgacgagtggatccgcgaggtcgacgtcgcccccgacggcaccatccgctacgacgacttcatccgccgcatcgtcgccaaataa

SEQ ID NO: 3771 - protein, 148 aa, Oryza sativa
MGGKELSEEQVASMREAFSLFDTDGDGRIAPSELGVLMRSLGGNPTQAQLRDIAAQEKLTAPFDFPRFLDLMRAHLRPEPFDRPLRDAFRVLDKDASGTVSVADLRHVLTSIGEKLEPHEFDEWIREVDVAPDGTIRYDDFIRRIVAK

SEQ ID NO: 3772 - DNA, 513 bp, Oryza sativa
  CDS (1)..(513)
atggagagccatctcaacgagcagcagatctccgatttccgagacgccttctcgctgttcgacaagaacaatgacggttgcataagtagggaggagctggccaccgtgctcacacgcctgggcatggcgccaagccaggaggatctgcaagacatgatcgtggccgtcgatgaggatggcaatggcacgatcgagttcgacgagttcctcgcaataatgaagaagaaactatatgagaatgacaagggtgatgatgaggaagaactgaggaaggctttcaggattttcgacaaggatgataatggattcatatcacgcaatgagttaagcatggtgatggctagtcttggagaggagatgacagaagatgagattgatgatatgatgaaggcagctgatagcaacaacgacgggcaagttgattacgaagagttcaagcgagtcatgatgagcacatggaatatcacagaaatattcaaacctcatgtaacaatctggcgttacaagccatga

SEQ ID NO: 3773 - protein, 170 aa, Oryza sativa
MESHLNEQQISDFRDAFSLFDKNNDGCISREELATVLTRLGMAPSQEDLQDMIVAVDEDGNGTIEFDEFLAIMKKKLYENDKGDDEEELRKAFRIFDKDDNGFISRNELSMVMASLGEEMTEDEIDDMMKAADSNNDGQVDYEEFKRVMMSTWNITEIFKPHVTIWRYKP

SEQ ID NO: 3774 - DNA, 552 bp, Oryza sativa
  CDS (1)..(552)
atggaccacctgacaaaggagcagatcgccgagttccgggaggcattcaacctgttcgacaaagatggagacgggacgatcacgagcaaggagcttgggacggtgatggggtcgctggggcagtcgccgacggaggcggagctgaagaagatggtggaggaggtggacgcggacggcagcggcagcatcgagttcgaggagttcctgggcctcctcgcccgcaagcttcgcgacaccggcgccgaggacgacatccgcgacgccttccgcgtcttcgacaaggaccagaacggcttcatcacccccgacgagctccgccacgtcatggccaacctcagcgaccccctctccgacgacgagctcgccgacatgctccacgaggccgactccgacggcgacggccagatcaactacaacgagttcctcaaggtcatgatggcaaagcgaaggcagaatatgatggagggacatggaagtggaggccatcggtcaagtaactcccacaagaaatccggctgctgcggcccgaattcctcatgtaccatcctctga

SEQ ID NO: 3775 - protein, 183 aa, Oryza sativa
MDHLTKEQIAEFREAFNLFDKDGDGTITSKELGTVMGSLGQSPTEAELKKMVEEVDADGSGSIEFEEFLGLLARKLRDTGAEDDIRDAFRVFDKDQNGFITPDELRHVMANLSDPLSDDELADMLHEADSDGDGQINYNEFLKVMMAKRRQNMMEGHGSGGHRSSNSHKKSGCCGPNSSCTIL

SEQ ID NO: 3776 - DNA, 501 bp, Oryza sativa
  CDS (1)..(501)
atggcggaggtggaggtgagggtgaggcaggagcaggtggcggagttcagggagacgttcgcgttcttcgacaaggacggggacgggtgcatcacgctggaggagctggacacggtggtgcggtcgctggggcagacgccgacgagggaggagctcgccgagatgatccgcgacgtcgacgtcgacggcaacggcaccatcgagttcgccgagttcctcgccctcatggcccgcaaggcctcgcgcggcggcgagaacggcggaggaggagacgactccggcgacgccgccgacgaggagctccgggaggcgttcaaggtgttcgacaaggaccaggacgggctcatctccgccgccgagctccgccacgtgatgatcagcctcggcgagaagctcaccgacgaggaggtggagcagatgatccgggaggccgacctcgacggcgacggccaggtcaacttcgacgagttcgtcaggatgatgatgctctccgaccaataa

SEQ ID NO: 3777 - protein, 166 aa, Oryza sativa
MAEVEVRVRQEQVAEFRETFAFFDKDGDGCITLEELDTVVRSLGQTPTREELAEMIRDVDVDGNGTIEFAEFLALMARKASRGGENGGGGDDSGDAADEELREAFKVFDKDQDGLISAAELRHVMISLGEKLTDEEVEQMIREADLDGDGQVNFDEFVRMMMLSDQ

SEQ ID NO: 3778 - DNA, 785 bp, Zea mays
  CDS (76)..(585)
gcctcctctgccacacacacacctcgccagcaccacagccatcgccacagtcacagtcagcgagagagagagagcatggacctgctgaaccccgagcagatctccgagttccgggaggcgttcgcgttcttcgacaaggacggcgacgggtgcatcacggtggaggagctggcgacggtgatggggtcgctgcaggggcagcggcccagcgcggaggagctgcgcgagatgatccgcgacgccgacgccgacggcaacggcgccatcgacttcgccgagttcctgggcctcatggcacgcaagaccgcggggggcggcgccggcggcggcgccgaccccgacgaggagctgcgcgaggcgttcaaggtgttcgacaaggaccagaacgggtacatctccgccaccgagctccgccacgtcatgatcaacctcggcgagaagctcacggacgaggaggtggagcagatgatccgcgaggccgacctcgacggcgacggccaggtcaactacgacgagttcgtcaggatgatgatgctctccgacggcgccggcgccggcgccgcagccacgggccaccaccaatgaacccatctccacctttcatcagcctagcgcttcccatcacgtcccttgccgatggagtggcggatcactccatccgtctctgcttcccttttctttttcaccccctcaaaaaaaaaaaaaagatcagcgtccgtctctctaatgtaacgtacgtaatgtaatgtaactgatcaaatattcaacaagaaatttaattaccg

SEQ ID NO: 3779 - protein, 169 aa, Zea mays
MDLLNPEQISEFREAFAFFDKDGDGCITVEELATVMGSLQGQRPSAEELREMIRDADADGNGAIDFAEFLGLMARKTAGGGAGGGADPDEELREAFKVFDKDQNGYISATELRHVMINLGEKLTDEEVEQMIREADLDGDGQVNYDEFVRMMMLSDGAGAGAAATGHHQ

SEQ ID NO: 3780 - DNA, 447 bp, Zea mays
  CDS (1)..(447)
atgggcggcaaggacctgacagaggagcagatcgcctcgatgcgggaggccttcacgctgttcgacacggacggggacggccgcatcgctcccacggagctgggcgtcctcatgcgctccctcggcgggaacccaacccaggcgcagctccgggacatcgccgcgcaggagaagctcacggcgcccttcgacttcccacgcttcctcggcctcatgcgcgcccacctcaggcccgagcccttcgaccgcccgctccgcgacgccttccgcgtcctcgacaaggacggctccggcaccgtcgccgtcgccgacctccgccacgtcctcacgtccatcggagagaagctcgaggtgcacgagttcgacgagtggatccgcgaggtcgacgtcgcgcccgacggcaccatccgctacgacgacttcatccgccgcatcgtcgccaaatga

SEQ ID NO: 3781 - protein, 148 aa, Zea mays
MGGKDLTEEQIASMREAFTLFDTDGDGRIAPTELGVLMRSLGGNPTQAQLRDIAAQEKLTAPFDFPRFLGLMRAHLRPEPFDRPLRDAFRVLDKDGSGTVAVADLRHVLTSIGEKLEVHEFDEWIREVDVAPDGTIRYDDFIRRIVAK

SEQ ID NO: 3782 - DNA, 462 bp, Zea mays
  CDS (1)..(462)
atggaggaggtggagcagcagctgaccaagaaacagatcgaggagttccgggaggcgttcagcctcttcgacaaagatggcgggacgatcacgaccaaggagctgggcacggtgatgcggtcgctggggcagagcccgacggaggaggagctgcaggagatggtggacgaggtggacgcggacggcagcggcgccatcgacctgcaggagttcctgaccctgctggcgcgccagatgcgggaggcgagcggcgccgacgaggacgagctccgggaggccttccacgtcttcgaccaggaccagaacggcttcatctcccgcgacgagctccgccacgtcctccagaacctcggcgagcgcctctccgaggaggagctcgccgagatgctccgcgaggccgacgcggacggcgacggccagatcaactactccgagttcgccaaggtcatgcttgccaagtga

SEQ ID NO: 3783 - protein, 153 aa, Zea mays
MEEVEQQLTKKQIEEFREAFSLFDKDGGTITTKELGTVMRSLGQSPTEEELQEMVDEVDADGSGAIDLQEFLTLLARQMREASGADEDELREAFHVFDQDQNGFISRDELRHVLQNLGERLSEEELAEMLREADADGDGQINYSEFAKVMLAK

SEQ ID NO: 3784 - DNA, 510 bp, Brassica napus
  CDS (1)..(510)
atgtcgagtctatacagaggtgtttcgaggaaagagaaacccagacgtcatcatgggttgaatcagcagaagaggcaagagatcaaggaagcttttgatctctttgacactgatggctctggtaccattgatgctaaagagcttaatgttgctatgagggcgcttggtttcgagatgacggaagagcaaatcgagaaaatgatagcagatgtggacaaggatggaagtggagccatagattacgatgagttttattatatgatgactgctaagatcggtgaacgtgacaccaaagaagagctcaccaaggctttcaagatcattgatcttgacaataatgggaagatatctgctgatgatatcaaacgcatggcaaaggacttgggtgaaaacttcactgatgctgagattcgtgagatggttgaagaagctgaccgtgaccgtgatggtgaagttaatatggaagagttcatgaggatgatgaagagaactgctgcttatgagtactaa

SEQ ID NO: 3785 - protein, 169 aa, Brassica napus
MSSLYRGVSRKEKPRRHHGLNQQKRQEIKEAFDLFDTDGSGTIDAKELNVAMRALGFEMTEEQIEKMIADVDKDGSGAIDYDEFYYMMTAKIGERDTKEELTKAFKIIDLDNNGKISADDIKRMAKDLGENFTDAEIREMVEEADRDRDGEVNMEEFMRMMKRTAAYEY

SEQ ID NO: 3786 - DNA, 450 bp, Brassica napus
  CDS (1)..(450)
atggccgatcagctgaccgacgatcagatctccgagttcaaggaagctttcagcctattcgacaaggacggagatggttgcatcacgacgaaagagcttggtacagtgatgaggtcgctaggccagaacccgacagaagcagagcttcaagacatgatcaacgaagttgacgctgacggcaacggaaccatagactttcccgagtttctcaacttgatggcgcgtaagatgaaggacacggattcggaggaagagctcaaagaagctttcagggtcttcgacaaggaccagaacggtttcatctccgccgcggagctgaggcatgtgatgaccaatttgggagagaagctgactgatgaagaggttgatgagatggtcagagaagctgatgttgatggagatggtcagatcaattacgatgagtttgtcaaagttatgatggcaaagtga

SEQ ID NO: 3787 - protein, 149 aa, Brassica napus
MADQLTDDQISEFKEAFSLFDKDGDGCITTKELGTVMRSLGQNPTEAELQDMINEVDADGNGTIDFPEFLNLMARKMKDTDSEEELKEAFRVFDKDQNGFISAAELRHVMTNLGEKLTDEEVDEMVREADVDGDGQINYDEFVKVMMAK

SEQ ID NO: 3788 - DNA, 510 bp, Brassica napus
  CDS (1)..(510)
atgagccgcgacgacggagacaagccttctccggcaccagggaagaagctaggcgacgagcagctagcagagctccgagagatattccgatcatacgaccagaacaacgacgggagtttgacggagctagagttagccgcgcttctcagatccctcggtctgaagccgagccaagaccagctcgacactctcatccacaaagcggaccggaacaacaacggaatcatcgagttctccgagttcgtcgccctcgtcgagccggatctcgtcaagtgcccttacacggaggaccagctcaaagccatcttcaagatgttcgaccgcgacgggaacgggtacataacggcggcggagctggcgcactcgatggcgaagctgggacacgcgttgacggcggaggagttgacggggatgatcagggaagcggatcgagacggtgacgggtgtattgatttccaagagtttgttcaggcgattacttctgctgcgtttgataatgcttggggatga

SEQ ID NO: 3789 - protein, 169 aa, Brassica napus
MSRDDGDKPSPAPGKKLGDEQLAELREIFRSYDQNNDGSLTELELAALLRSLGLKPSQDQLDTLIHKADRNNNGIIEFSEFVALVEPDLVKCPYTEDQLKAIFKMFDRDGNGYITAAELAHSMAKLGHALTAEELTGMIREADRDGDGCIDFQEFVQAITSAAFDNAWG

SEQ ID NO: 3790 - DNA, 471 bp, Brassica napus
  CDS (1)..(471)
atggacaagacacaactaaaacaacaagaactgactcaagaacagatcatggagtttaaagaggcgttttgtctgttcgacaaagatggagatggttgcatcactgctgatgagcttgccactgtgatccgctcgttggatcagaatccgaccgaacaagagcttcaagatatgatcaatgagatcgactccgatggtaacggcaccatcgaattctctgagttcctcaacctcatggccaacaaaatccaggaaactgatgcagatgaggagcttaaagaagcattcaaagtgtttgacaaagaccaaaatggctacatctcggccagcgagttgaggcatgtgatgatcaatcttggggagaagctaaccgatgaagatgtcgctcaaatgataaaggaggcagatttggatggtgatggtcaagtcaattatgatgaatttgtgaggatgatgatgacaagcggttaa

SEQ ID NO: 3791 - protein, 156 aa, Brassica napus
MDKTQLKQQELTQEQIMEFKEAFCLFDKDGDGCITADELATVIRSLDQNPTEQELQDMINEIDSDGNGTIEFSEFLNLMANKIQETDADEELKEAFKVFDKDQNGYISASELRHVMINLGEKLTDEDVAQMIKEADLDGDGQVNYDEFVRMMMTSG

SEQ ID NO: 3792 - DNA, 450 bp, Brassica napus
  CDS (1)..(450)
atggcggatcagctaacggacgaacagatctccgagttcaaggaagctttcagcctcttcgacaaggacggcgatggttgcatcaccaccaaggagctggggacagtgatgcggtccctaggacagaacccaacagaagctgagctccaggacatgatcaacgaggtggacgcggacggcaacggcaccattgacttccctgagttcctaaacctcatggctaaaaagatgaaagacacggactcggaggaagagctcaaagaagctttcagggtgttcgacaaagaccagaacggattcatatccgctgcagagctccgccatgtcatgacgaatctaggcgagaagcttactgatgaagaagttgaggagatggtccgtgaagctgatgttgatggagatggtcagattaactacgaggagtttgtcaagattatgatggctaagtga

SEQ ID NO: 3793 - protein, 149 aa, Brassica napus
MADQLTDEQISEFKEAFSLFDKDGDGCITTKELGTVMRSLGQNPTEAELQDMINEVDADGNGTIDFPEFLNLMAKKMKDTDSEEELKEAFRVFDKDQNGFISAAELRHVMTNLGEKLTDEEVEEMVREADVDGDGQINYEEFVKIMMAK

SEQ ID NO: 3794 - DNA, 447 bp, Brassica napus
  CDS (1)..(447)
atgggcaaggacggcttgagcgacgaccaggtctcctcaatgaaggaagccttcacgctcttcgacaccgacggcgacggcaaaatcgccccctccgagctcgggatcctgatgcgatccctcggcgggaacccgacccaagcccagctgaaatccataaccgcctccgagagcctcacctcccccttcgatttcagccgtttcctcgatctgatggcgaagcatttgaagacggagcccttcgatcgccagctcagggatgctttcaaggtgctcgacaaggaagggagcgggtttgttgccgtggcggatctgaggcatatattgacgagtatcggggagaagctggaggggagtgagtttgatgagtggatcaaggaggtggatgtgggatccgatgggaagattaggtatgaggattttattgcgaggatggttgctaagtag

SEQ ID NO: 3795 - protein, 148 aa, Brassica napus
MGKDGLSDDQVSSMKEAFTLFDTDGDGKIAPSELGILMRSLGGNPTQAQLKSITASESLTSPFDFSRFLDLMAKHLKTEPFDRQLRDAFKVLDKEGSGFVAVADLRHILTSIGEKLEGSEFDEWIKEVDVGSDGKIRYEDFIARMVAK

SEQ ID NO: 3796 - DNA, 507 bp, Glycine max
  CDS (1)..(507)
atgtctacaatgaaggggcagacaaggagggagaggcctagaactcgtcctcatggcctcacgcaacagaagaggcaggaaataaaggaagcgtttgatctttttgacaccgataactcaggaaccatcgatgccaaggagctgaatgttgcgatgagagccttgggatttgagatgacagaagagcaaatcaatcagatgattgctgatgttgacaaagatggcagtggatcgatagattatgaggagtttgagcacatgatgactgccaagattggggagagggatactaaagaagagcttacaaaagcgttccgcatcattgaccaagataaaaatgggaagatttcagatgttgatattcagcgtattgccaaggagttgggtgaaaacttcactctccaagagatccaagaaatggttcaagaggcagatcaaaatggtgatggtgagatagattttggcgagtttgccaggatgatgaagaagaccagttatggctactag

SEQ ID NO: 3797 - protein, 168 aa, Glycine max
MSTMKGQTRRERPRTRPHGLTQQKRQEIKEAFDLFDTDNSGTIDAKELNVAMRALGFEMTEEQINQMIADVDKDGSGSIDYEEFEHMMTAKIGERDTKEELTKAFRIIDQDKNGKISDVDIQRIAKELGENFTLQEIQEMVQEADQNGDGEIDFGEFARMMKKTSYGY

SEQ ID NO: 3798 - DNA, 507 bp, Triticum aestivum
  CDS (1)..(507)
atggccggcgccggtgcagcagcgatcagttcggagcagatgagcgagttccgggaggccttcgccttcttcgacaaggacggcgacggctgcatcacggcggaggagctgtccacggtcatccgctccctgggccagtccccgacgcccgaggagctgcgcgacatggtgcgcgacgtggacgccgacggcaacggcaccatcgagttcgccgagttcctggcgctcatgtcccgcaaggccgacgccgacgccgacgccgccgacccagaggaggagctccgggaggccttcagggtgttcgacaaggaccacgacggccacatctccaaggccgagctgcgccacgtcatgatcagcctcggcgagaagctcaccgacgacgaggtggacgggatgatccaggaggccgacctcgacggcgacggcctcgtcaacttcgacgagttcgtcaggatgatgatgctctcagacgccgaccagcagcagcagcagcagcagcattga

SEQ ID NO: 3799 - protein, 168 aa, Triticum aestivum
MAGAGAAAISSEQMSEFREAFAFFDKDGDGCITAEELSTVIRSLGQSPTPEELRDMVRDVDADGNGTIEFAEFLALMSRKADADADAADPEEELREAFRVFDKDHDGHISKAELRHVMISLGEKLTDDEVDGMIQEADLDGDGLVNFDEFVRMMMLSDADQQQQQQQH

SEQ ID NO: 3800 - DNA, 441 bp, Linum usitatissimum
  CDS (1)..(441)
atgggaaaggttagcgacgaccaggttcactcgatgaaagaggccttcgtcctcttcgacaccgacggcgacggcaaaatcgcgccctccgagctcgggatcctcatgcgatccctcggcggcaaccctacccaggcccagctcaaagccatcgtcaccgaggagaagctaaccgctccgttcgatttccagaggttcctcgatatcatggggaagcacatgaaaaccgagcccttcgatcgccagctccgcgacgctttcaaggtcctcgataaggactccgccgggttcgtctcagtacaggatctgcgccacatcttgacgagtatcggggagaagctggagcctgcagagttcgacgagtggatccgggaggtggatgtcggatcggatgggaagatccggtacgaggatttcattgctaggatggttgccaagtga

SEQ ID NO: 3801 - protein, 146 aa, Linum usitatissimum
MGKVSDDQVHSMKEAFVLFDTDGDGKIAPSELGILMRSLGGNPTQAQLKAIVTEEKLTAPFDFQRFLDIMGKHMKTEPFDRQLRDAFKVLDKDSAGFVSVQDLRHILTSIGEKLEPAEFDEWIREVDVGSDGKIRYEDFIARMVAK

SEQ ID NO: 3802 - DNA, 528 bp, Linum usitatissimum
  CDS (1)..(528)
atggcggaagcaatctcagccgaagcatcaccgaaacccaccccgacgatcaccccaccggccgccggcacctacagcacggacgagctccgaaaagtgttcgagaagttcgacaccaacggcgacggcaagatctctgcctcggagctggccggagtgctcagatccatgggaaccgagtactccccaccggatctccatcgcgcgatggaggagatcgactccgacaaggacggtttcatcaacctggaggagttcgcgcagctctgccgtacgtcgtcgtcggctggaggagccgcggaggagctccgggaggcgttcgatctgtacgacgagaacaaggacgggctcatctcggaggcagagctccaccaggtgcttaaccgcatcgggatgaggtgctcggtggatgagtgcgcaaggatgatcaagggcgtggattccgacggggatgggcgtgttaattacaaggagttcgagaagatgatggcatcatctaacggcggaggaggtcccgcgaagaactag

SEQ ID NO: 3803 - protein, 175 aa, Linum usitatissimum
MAEAISAEASPKPTPTITPPAAGTYSTDELRKVFEKFDTNGDGKISASELAGVLRSMGTEYSPPDLHRAMEEIDSDKDGFINLEEFAQLCRTSSSAGGAAEELREAFDLYDENKDGLISEAELHQVLNRIGMRCSVDECARMIKGVDSDGDGRVNYKEFEKMMASSNGGGGPAKN

SEQ ID NO: 3804 - DNA, 444 bp, Linum usitatissimum
  CDS (1)..(444)
atggggaaggatctaagcgacgaccaggttcactcgatgaaggaggccttcgtcctcttcgacacggacggcgacggcaagatcgcgccctccgagctggggatcttaatgcggtccctcggcgggaacccgacccaggcccagctgaaatcgatcgtcgccgaggagaagctgaccgcccccttcgatttccagaggtttctcgagctgatggggaagcacatgaagccggagccgttcgatcgccagctccgcgacgcgttcaaggtgctggacaaggattcgaccgggttcgtctccgtgcaggatctgcggcatatcttgaccagcatcggggagaagctggagcctgcggagttcgacgaatggatccgggaggtggatgttgggtcggatgggaagatccggtatgaggatttcattgctaggatggtggctaagtga

SEQ ID NO: 3805 - protein, 147 aa, Linum usitatissimum
MGKDLSDDQVHSMKEAFVLFDTDGDGKIAPSELGILMRSLGGNPTQAQLKSIVAEEKLTAPFDFQRFLELMGKHMKPEPFDRQLRDAFKVLDKDSTGFVSVQDLRHILTSIGEKLEPAEFDEWIREVDVGSDGKIRYEDFIARMVAK

SEQ ID NO: 3806 - DNA, 450 bp, Hordeum vulgare
  CDS (1)..(450)
atggcggaccagctcagcgaggagcagattggcgagttcaaggaggccttcagcctcttcgacaaggacggcgacggtagcatcaccaccaaggagcttggaaccgtgatgcgctcccttggccagaaccctaccgaggcggagctgcaggacatgatcaacgaggtggatgcggacggcaacggcaccattgacttcccagagttcctgaacctgatggcccgcaagatgaaggacaccgactcggaggaggagctcaaggaggcgttccgtgtctttgacaaggaccagaacggcttcatctccgcggcggagctccgccaggtgatgaccaacctcggggagaagctgtcggaggaggaggtggaggagatggtccgggaggcggacgtggacggcgacggccagatcaactacgacgagttcgtcaaggtcatgatggccaagtga

SEQ ID NO: 3807 - protein, 149 aa, Hordeum vulgare
MADQLSEEQIGEFKEAFSLFDKDGDGSITTKELGTVMRSLGQNPTEAELQDMINEVDADGNGTIDFPEFLNLMARKMKDTDSEEELKEAFRVFDKDQNGFISAAELRQVMTNLGEKLSEEEVEEMVREADVDGDGQINYDEFVKVMMAK

SEQ ID NO: 3808 - DNA, 444 bp, Hordeum vulgare
  CDS (1)..(444)
atggggaaagatacagccaccgatcaaacctccgccatgaaagaagcctttacactcttcgacaccgacggggacggcaagatcgccccatcggagctcggaatcctcatgcgttcactcggcggaaaccctacgcaagcgcagttgaaatccatcatctccgaagaaaaactcacatctccgtttgactttaaacgtttcactgagctcatgaacaagcacctgaaaccggagccctttgatcgacagcttcgtgacgccttcaaggttattgataaggacggaaccggatacgtcgtcgttgcggatcttaaacatattttgacgagtattggggagaagcttgagcctgcggagtttgatgagtggatccgagagattgatgttggatccgatgggaagattaagtatgaggagtttattgccagaatggttgccaaatga

SEQ ID NO: 3809 - protein, 147 aa, Hordeum vulgare
MGKDTATDQTSAMKEAFTLFDTDGDGKIAPSELGILMRSLGGNPTQAQLKSIISEEKLTSPFDFKRFTELMNKHLKPEPFDRQLRDAFKVIDKDGTGYVVVADLKHILTSIGEKLEPAEFDEWIREIDVGSDGKIKYEEFIARMVAK

SEQ ID NO: 3810 - DNA, 498 bp, Hordeum vulgare
  CDS (1)..(498)
atggcgggcgccggcgcaacagcagggatcagctcggagcagatgagcgagttccgggaggcgttcgccttcttcgacaaggacggggacggctgcatcacggcggaggagctgtccacggtcatccggtccctgggccagaccccgacgcccgaggagctgcgggacatggtgcgcgacgtggacgccgacggcaacggcaccatcgagttcgccgagttcctcgcgctcatgtcacgcaaggccgacgccgacgcggacgccgccgaccccgaggaggagctccgggaggccttcagggtcttcgacaaggaccacgacggccacatctccaaggccgagctgcgccacgtcatgatcagcctcggcgagaagctcaccgacgacgaggtggacgggatgatccaggaggccgacctcgacggcgacggcctcgtcaatttcgacgagttcgtcaggatgatgatgctctccgacgccgaccagcaccagcattga

SEQ ID NO: 3811 - protein, 165 aa, Hordeum vulgare
MAGAGATAGISSEQMSEFREAFAFFDKDGDGCITAEELSTVIRSLGQTPTPEELRDMVRDVDADGNGTIEFAEFLALMSRKADADADAADPEEELREAFRVFDKDHDGHISKAELRHVMISLGEKLTDDEVDGMIQEADLDGDGLVNFDEFVRMMMLSDADQHQH

SEQ ID NO: 3812 - DNA, 420 bp, Hordeum vulgare
  CDS (1)..(420)
atggccagcacaaactacaaggaggctttcgccttatttgacaaacgtggaaaccagcgcgtacaggtggaaagcttaggagatttattaagagcttgtggccaaaatcctaccctggcagagataagggatttagaaaagaatgttggttcagactttgacttcgaaactttttcaaaggtactcaatagaccgggcggcttccgcgagccaggtgagccagaagaatattgccgtggttttcaagtcttcgacaaggagatgacaggctttattggtgttggacaactacgctacattctgacaaatctgggagagaaaatgagtgacgaggaagtcgatgagttgttgaaagcagtgaacgtttcaagtggagagatcaattacactgacctagtgcgcacaatcctcgcgaattag

SEQ ID NO: 3813 - protein, 139 aa, Hordeum vulgare
MASTNYKEAFALFDKRGNQRVQVESLGDLLRACGQNPTLAEIRDLEKNVGSDFDFETFSKVLNRPGGFREPGEPEEYCRGFQVFDKEMTGFIGVGQLRYILTNLGEKMSDEEVDELLKAVNVSSGEINYTDLVRTILAN

SEQ ID NO: 3814 - DNA, 507 bp, Helianthus annuus
  CDS (1)..(507)
atgggagtttacggagaacaatcccggagagaaaagcccagaggtcgtaatcatgggttaactcagcagaaacggcaagagatcaaagaagcatttgagctattcgataccgatggatctgggaccattgatgccaaggagttgaatgttgccatgagggcccttggttttgaaatgacagaggagcaaattaatcaaatgatcgctgatgtggacaaagatggcagcggtgcaattgatttcgatgaatttgtatacatgatgactgccaaaatcggtgaacgggacagcaaacaagagcttacaaaagcattccagatcatcgaccaagataaaaatgggaagatatcaattcaagatatcaagaatattgctaaggaacttggtgaacatttcactgatgcagagatcaatgagatggtggaggaagcagatcgtgaccgtgatggagaagttagtgtggaggaattcatgagaatgatgaagaggacttcatatggatactag

SEQ ID NO: 3815 - protein, 168 aa, Helianthus annuus
MGVYGEQSRREKPRGRNHGLTQQKRQEIKEAFELFDTDGSGTIDAKELNVAMRALGFEMTEEQINQMIADVDKDGSGAIDFDEFVYMMTAKIGERDSKQELTKAFQIIDQDKNGKISIQDIKNIAKELGEHFTDAEINEMVEEADRDRDGEVSVEEFMRMMKRTSYGY

SEQ ID NO: 3816 - DNA, 450 bp, Brassica napus
  CDS (1)..(450)
atggcggatcagctcaccgacgatcagatctccgagttcaaggaagccttcagcttattcgacaaagatggtgacggttgcattaccaccaaggagctgggaactgtgatgcgttctctcggacagaacccaaccgaagctgagctccaagacatgatcaatgaagttgacgctgacggtaacggcaccattgatttccccgagttcttgaacctcatggctcgtaagatgaaggacaccgactccgaggaagagctcaaggaagcgttccgggttttcgacaaggaccagaacggtttcatctcggctgctgagctccgtcatgtgatgacaaacttaggcgagaagctcacggatgaagaggttgatgagatgatcaaggaagctgatgttgatggtgatggtcagattaactatgacgagtttgtcaaggtcatgatggctaagtga

SEQ ID NO: 3817 - protein, 149 aa, Brassica napus
MADQLTDDQISEFKEAFSLFDKDGDGCITTKELGTVMRSLGQNPTEAELQDMINEVDADGNGTIDFPEFLNLMARKMKDTDSEEELKEAFRVFDKDQNGFISAAELRHVMTNLGEKLTDEEVDEMIKEADVDGDGQINYDEFVKVMMAK

SEQ ID NO: 3818 - DNA, 447 bp, Brassica napus
  CDS (1)..(447)
atgggcaaggacggcctgagcgacgaccaggtctcatcaatgaaggaggccttcacgctcttcgacaccaacggcgacggcaaaatcgccccgaccgagctcgggatcctcatgcgatcgctcggcgggaacccgacccaagcccagctgaaatcaatcaccgcctccgaaaacctaaccgctccgttcgatttcgaccggtttttggatctcatggcgaagcacctgaagacggagcctttcgatcgccagctccgcgacgccttcaaggtgctcgacaaggaaggcaccgggttcgtggcagtggcggatctgaggcatatcttgacaagtatcggggagaagctggagcctaacgagtttgacgagtggatcaaggaggtggatgtggggtccgatgggaagatcaagtatgaggatttcattgccaggatggttgctaagtga

SEQ ID NO: 3819 - protein, 148 aa, Brassica napus
MGKDGLSDDQVSSMKEAFTLFDTNGDGKIAPTELGILMRSLGGNPTQAQLKSITASENLTAPFDFDRFLDLMAKHLKTEPFDRQLRDAFKVLDKEGTGFVAVADLRHILTSIGEKLEPNEFDEWIKEVDVGSDGKIKYEDFIARMVAK

SEQ ID NO: 3820 - DNA, 447 bp, Brassica napus
  CDS (1)..(447)
atgggaaaggacggcctgagcgacgaccaggtctcgtcgatgaaggaggctttcatgctcttcgacaccgacggcgacggcaaaatcgctccctccgagctcgggatcctgatgcgatccctcggcgggaacccgacccaagcccagctgaaatcaatcaccgcctccgaaagcctaaccgctccgttcgatttcaaccgtttcctggatctcatggcgaagcacctgaagacggagccgttcgatcgccagctccgcgacgccttcaaggtgctcgacaaggaaggcacggggttcgtggccgtggcggatctgaggcatatcctcaccagcatcggcgagaagctggagccgaacgagttcgatgagtggatcaaggaggtggatgttggatccgacgggaagatccggtatgaggatttcatcgccaggatggtcgccaagtga

SEQ ID NO: 3821 - protein, 148 aa, Brassica napus
MGKDGLSDDQVSSMKEAFMLFDTDGDGKIAPSELGILMRSLGGNPTQAQLKSITASESLTAPFDFNRFLDLMAKHLKTEPFDRQLRDAFKVLDKEGTGFVAVADLRHILTSIGEKLEPNEFDEWIKEVDVGSDGKIRYEDFIARMVAK

SEQ ID NO: 3822 - DNA, 450 bp, Brassica napus
  CDS (1)..(450)
atggcggatcagctgaccgatgaccagatctcaaagttcaaggaagccttcagcctcttcgacaaggatggcgatggttgcatcaccaccaaggagctcgggaccgtgatgaggtctctggggcaaaacccaacagaagccgagctccaagacatgatcaacgaagttgacgctgacgggaacgggaccatcgacttccctgagttcctgaacctgatggcgaggaagatgaaggacactgactcggaggaagagctcaaggaagccttcagggtgtttgataaagaccagaacggtttcatctccgcggctgagctccgacatgtgatgactaacctcggggagaagctgaccgacgaggaagttgatgagatgatccgtgaagctgatgttgatggcgatggtcagatcaactacgatgagttcgttaaagtcatgatggccaagtga

SEQ ID NO: 3823 - protein, 149 aa, Brassica napus
MADQLTDDQISKFKEAFSLFDKDGDGCITTKELGTVMRSLGQNPTEAELQDMINEVDADGNGTIDFPEFLNLMARKMKDTDSEEELKEAFRVFDKDQNGFISAAELRHVMTNLGEKLTDEEVDEMIREADVDGDGQINYDEFVKVMMAK

SEQ ID NO: 3824 - DNA, 450 bp, Brassica napus
  CDS (1)..(450)
atggcggatcagctaacggacgaacagatctccgagttcaaggaagcgtttagcctcttcgacaaggatggcgatggttgcatcaccaccaaggagctggggacagtgatgaggtctctaggacagaacccaacagaagctgagctccaggacatgatcaacgaggtggacgcggacggcaacggcaccattgacttccctgagttcctaaacctcatggctaaaaagatgaaagacacggactcggaggaagagctcaaagaagctttcagggtgttcgacaaagaccagaacgggttcatatccgctgcagagctccgccatgttatgacgaatctaggcgagaagcttactgatgaagaagttgatgagatggtccgtgaagctgatgttgatggagatggtcagataaactacgaggagtttgtcaagattatgatggctaagtga

SEQ ID NO: 3825 - protein, 149 aa, Brassica napus
MADQLTDEQISEFKEAFSLFDKDGDGCITTKELGTVMRSLGQNPTEAELQDMINEVDADGNGTIDFPEFLNLMAKKMKDTDSEEELKEAFRVFDKDQNGFISAAELRHVMTNLGEKLTDEEVDEMVREADVDGDGQINYEEFVKIMMAK

SEQ ID NO: 3826 - DNA, 543 bp, Brassica napus
  CDS (1)..(543)
atggccgatcagctcaccgatgatcagatctccgagtttaaagaagctttcagcctcttcgacaaggacggagatggttgcatcacaacgaaagagttaggcacagtgatgaggtcactcggacagaacccgacagaagcagagcttcaagacatgatcaacgaagtcgacgcggacgggaacggaaccatagactttcccgagtttctcaacctgatggctcgtaagatgaaggacaccgattccgaggaagagctcaaggaggctttcagggttttcgacaaggaccagaacggtttcatctccgctgcggagctgaggcacgtgatgaccaatttgggggagaagttgactgatgaagaggtggatgagatgatcagagaagctgacgttgatggagatggtcagatcaattatgaagagtttgtcaaagttatgatggcaaagagaagacgtaagaggagtatggcggggaaacctagcagcagtactgaacgcaaagaagagagacgtcgccgtaaaagtcattgccgtattctctga

SEQ ID NO: 3827 - protein, 180 aa, Brassica napus
MADQLTDDQISEFKEAFSLFDKDGDGCITTKELGTVMRSLGQNPTEAELQDMINEVDADGNGTIDFPEFLNLMARKMKDTDSEEELKEAFRVFDKDQNGFISAAELRHVMTNLGEKLTDEEVDEMIREADVDGDGQINYEEFVKVMMAKRRRKRSMAGKPSSSTERKEERRRRKSHCRIL

SEQ ID NO: 3828 - DNA, 450 bp, Brassica napus
  CDS (1)..(450)
atggcggagcagctgacagacgagcagatatccgaattcaaggaagcctttggcctcttcgacaaagatggcgatggttgcatcactaccaaagagctgggaacagttatgcgttctctaggacaaaacccaaccgaggctgagctccaggacatgatcaacgaggttgacgccgatggaaacggaaccatcgactttcccgagttcctgaacctgatggctaagaagatgaaggacactgactcagaggaagagctgaaagaagcattcagggttttcgacaaagaccagaacggtttcatctccgctgctgagcttcgccatgttatgaccaatctcggtgagaagctgactgatgaggaagttgaagagatggtccgtgaggctgatgttgatggtgatggtcagataaactatgaagagtttgtcaagattatgatggctaagtga

SEQ ID NO: 3829 - protein, 149 aa, Brassica napus
MAEQLTDEQISEFKEAFGLFDKDGDGCITTKELGTVMRSLGQNPTEAELQDMINEVDADGNGTIDFPEFLNLMAKKMKDTDSEEELKEAFRVFDKDQNGFISAAELRHVMTNLGEKLTDEEVEEMVREADVDGDGQINYEEFVKIMMAK

SEQ ID NO: 3830 - DNA, 543 bp, Brassica napus
  CDS (1)..(543)
atggccgatcagctcaccgatgatcagatctccgagtttaaagaagctttcagcctcttcgacaaggacggagatggttgcatcacaacgaaagagttaggtacagtgatgaggtcactcggacagaacccgacagaagcagagcttcaagacatgatcaacgaagtggatgcggacgggaacggaaccatagactttcccgagtttctcaacctgatggctcgtaagatgaaggacaccgattccgaggaggagctcaaggaggctttcagggttttcgacaaggaccagaacggtttcatctccgctgcggagctgaggcacgtgatgaccaatttgggggagaagttgactgatgaagaggtggatgagatgatcagagaagctgacgttgatggagatggtcagatcaattatgaagagtttgtcaaagttatgatggcaaagagaagacgtaagaggagtatggcggggaatcctagcagcagtactgaacgcaaagaagagagacgtcgccgtaaaagtcattgccgtattctctga

SEQ ID NO: 3831 - protein, 180 aa, Brassica napus
MADQLTDDQISEFKEAFSLFDKDGDGCITTKELGTVMRSLGQNPTEAELQDMINEVDADGNGTIDFPEFLNLMARKMKDTDSEEELKEAFRVFDKDQNGFISAAELRHVMTNLGEKLTDEEVDEMIREADVDGDGQINYEEFVKVMMAKRRRKRSMAGNPSSSTERKEERRRRKSHCRIL

SEQ ID NO: 3832 - DNA, 543 bp, Glycine max
  CDS (1)..(543)
atggccacgaatccaatcgaagcggggaacggcgacgctgctcccaaccctaacgcgactaccaaatcctccgtgtacctgcaagactcggaggagctgaagcgagtcttcagccgcttcgacgccaacggcgacggcaagatctccgtctcggagttggacaacgtcctccgctccctcggatccggcgtcccgccggaggagctccagcgtgtcatggaagaccttgacaccgatcacgacggcttcattaacctctcggagttcgccgccttctgccgctccgacaccgcggacggcggcgacaccgagctccacgatgccttcaacctgtacgatcaggacaagaacggcctcatatccgccacggagctctgccaggtgctgaaccgcctcggaatgaagtgctccgtggaggaatgccacaacatgatcaaatccgtggattccgacggcgacggcaacgtcaacttccccgagttcaagcggatgatgagcaacaatcgcgaaaatgctagcaatgctgaagaaaaaacagattag

SEQ ID NO: 3833 - protein, 180 aa, Glycine max
MATNPIEAGNGDAAPNPNATTKSSVYLQDSEELKRVFSRFDANGDGKISVSELDNVLRSLGSGVPPEELQRVMEDLDTDHDGFINLSEFAAFCRSDTADGGDTELHDAFNLYDQDKNGLISATELCQVLNRLGMKCSVEECHNMIKSVDSDGDGNVNFPEFKRMMSNNRENASNAEEKTD

SEQ ID NO: 3834 - DNA, 507 bp, Glycine max
  CDS (1)..(507)
atgtccatgctcgaaaccgaccaaatcaagcaactgaacgacatattcaagcgcttcgacatggaccaggacggcagcctgacccacctggagctggcggcgctcctccggtccctgggcatcaaacccaccggcgacgaaatctacgccctcctctctaacatggacgaaaacggcaacggctacatcgagttcgacgagctcgtgcatgccatcatgcctgacctcaccgagagcgtcctcatcaaccaggagcagctcctcgaggtcttccggtctttcgaccgtgatggcaacggctacatcacagccagcgagctcgcgggttccatggcgaagatgggccagccactcacctaccgcgagctcgcctccatgatggctgaggccgatagcaacggcgacggcgtcattagcttcaacgagttcgccgccctcatggccaaatccgccgctgaatttctcggcgtcaacgtcgcctacatggctagatcaatacggggctaa

SEQ ID NO: 3835 - protein, 168 aa, Glycine max
MSMLETDQIKQLNDIFKRFDMDQDGSLTHLELAALLRSLGIKPTGDEIYALLSNMDENGNGYIEFDELVHAIMPDLTESVLINQEQLLEVFRSFDRDGNGYITASELAGSMAKMGQPLTYRELASMMAEADSNGDGVISFNEFAALMAKSAAEFLGVNVAYMARSIRG

SEQ ID NO: 3836 - DNA, 447 bp, Zea mays
  CDS (1)..(447)
atgggcggcaaggacctgacagaggagcagatcgcctcgatgcgggaggccttcacgctgttcgacacggacggggacggccgcatcgctcccacggagctgggcgtcctcatgcgctccctcggcgggaacccaacccaggcgcagctccgggacatcgccgcgcaggagaagctcaccgcgcccttcgacttcccgcgcttcctcgacctcatgcgcgcccacctcaagcccgagcccttcgaccgcccgctccgcgacgccttccgcgtcctcgacaaggacggctccggcaccgtcgccgtcgccgacctccgccacgtcctcacctccatcggcgagaagctcgaggcccacgagttcgacgagtggatccgcgaggtcgacgtcgcgcccgacggcaccatccgctacgacgacttcatcctccgcatcgtcgccaaatga

SEQ ID NO: 3837 - protein, 148 aa, Zea mays
MGGKDLTEEQIASMREAFTLFDTDGDGRIAPTELGVLMRSLGGNPTQAQLRDIAAQEKLTAPFDFPRFLDLMRAHLKPEPFDRPLRDAFRVLDKDGSGTVAVADLRHVLTSIGEKLEAHEFDEWIREVDVAPDGTIRYDDFILRIVAK

SEQ ID NO: 3838 - DNA, 447 bp, Glycine max
  CDS (1)..(447)
atggcaggagcactgacagatgatcagattgctgaattccatgaagccttttgcctcattgacaaggactctgatggattcattactgtggatgaattggcaaccattatccgatcattagaagggaatccaacgaaagaagaaatccaagacatgattagtgaggtcgatattgatgggaatgggagtatagattttgaagagttcttgaatattatgggaagaaaaatgaaggaaactctagctgaagagctgagagaagcattcaaagtatttgacagagatcaaaatggatacatatccgccactgagctgaggcacgtaatgatgaatttgggagagaggctgacagatgaagaggcagaacaaatgattagagaggcagatttggatggggatggtcaagttagctttgaagaatttgcaaggattatgatgctcaaatga

SEQ ID NO: 3839 - protein, 148 aa, Glycine max
MAGALTDDQIAEFHEAFCLIDKDSDGFITVDELATIIRSLEGNPTKEEIQDMISEVDIDGNGSIDFEEFLNIMGRKMKETLAEELREAFKVFDRDQNGYISATELRHVMMNLGERLTDEEAEQMIREADLDGDGQVSFEEFARIMMLK

SEQ ID NO: 3840 - DNA, 492 bp, Glycine max
  CDS (1)..(492)
atgagcaaaaaacagacggtgaaattagacgaggagcaaatcgcagaattgcgagaaatctttcggtccttcgatcggaacaatgacgggagcctgacgcagttggagctgagttcgcttctgcgctcgcttggtctgaagcccagtgcagaccaactcgagggatttattcagagggcggacaccaacaacaacggcatggtggagttctcggagttcgttgctctggtcgcgccggagcttctgccggccaagtcgccctacacggaagagcagctgaagcagctgttccgaatgttcgatcgtgacgggaacggcctcatcactgcggcggagttggctcactccatggctaggcttggccatgccctcaccgccgaggagctgaccgggatgatcaaagaggccgacaccgacggcgatggcatgatcaactatcatgagtacgctcatgctattacttccgctgcttttgataattgctggccttaa

SEQ ID NO: 3841 - protein, 163 aa, Glycine max
MSKKQTVKLDEEQIAELREIFRSFDRNNDGSLTQLELSSLLRSLGLKPSADQLEGFIQRADTNNNGMVEFSEFVALVAPELLPAKSPYTEEQLKQLFRMFDRDGNGLITAAELAHSMARLGHALTAEELTGMIKEADTDGDGMINYHEYAHAITSAAFDNCWP

SEQ ID NO: 3842 - DNA, 450 bp, Glycine max
  CDS (1)..(450)
atgaaggacgccttgagggaagagcaaattggtgagtttttggaggccttctgtctttttgacaaagatggagatggctgcataaccatcgaagaattaagcactgcaatcagatcactagatgaaaatccaacggtggaggagttgcaaattatgatgaacgaagtggacatggacggcaacggaaccatagaattcggggaattcttgaatctcatggccagaaaaatgaaggaaactgaagcagaagaggaactgaaggaagctttcagggtgttagacaaagatcatgatggttatatatcgcccagcgagttgaggtctgtaatgagaactattggggagaaggtgacagacgaagaagtggaacagatggtcaaagaggcagatttagatggtgatggcctcattgattatgaagagttcgtgaggatgatgttggctgattaa

SEQ ID NO: 3843 - protein, 149 aa, Glycine max
MKDALREEQIGEFLEAFCLFDKDGDGCITIEELSTAIRSLDENPTVEELQIMMNEVDMDGNGTIEFGEFLNLMARKMKETEAEEELKEAFRVLDKDHDGYISPSELRSVMRTIGEKVTDEEVEQMVKEADLDGDGLIDYEEFVRMMLAD

SEQ ID NO: 3844 - DNA, 507 bp, Helianthus annuus
  CDS (1)..(507)
atgagagtttacggagaacaatcccggagagaaaagcccagaggtcgtaatcatgggttaactcagcagaaacggcaagagatcaaagaagcatttgagctattcgataccgatggatctgtgaccattgatgccaaggagttgaatgttgccataagggcccctggatttgaaatgacagaggagcaaattaaccaaatgatcgctgatgtggacaaagatggcaacgcggcaattgatttcgatgaatttgtaaaaatgatgactgccaaaatcggtgaacgggacagcaaacaagagcttacaaaagcattccagatcatcgaccaagataaaaatgggaagatatccattcaagatatcaagaatattgctaaggaacttggtgaacatttcaccgatgcagagatcaatgagatggtggaggaagcagatcgtgaccgtgatggagaagttagtgtggaggaattcatgagaatgatgaagaggacttcatatggatactag

SEQ ID NO: 3845 - protein, 168 aa, Helianthus annuus
MRVYGEQSRREKPRGRNHGLTQQKRQEIKEAFELFDTDGSVTIDAKELNVAIRAPGFEMTEEQINQMIADVDKDGNAAIDFDEFVKMMTAKIGERDSKQELTKAFQIIDQDKNGKISIQDIKNIAKELGEHFTDAEINEMVEEADRDRDGEVSVEEFMRMMKRTSYGY

SEQ ID NO: 3846 - DNA, 450 bp, Hordeum vulgare
  CDS (1)..(450)
atggcggaccagctcagcgaggagcagattggcgagttcaaggaggccttcagcctcttcgacaaggacggcgacggtagcatcaccaccaaggagcttggaaccgtgatgcgctcccttgggcagaaccccaccgaggcagacgtgcaggacatgatcaacgaggtggatgcggacggcaacggcaccattgacttcccagagttcctgaacctgatggcccgcaagatgaaggacaccgactcggaggaggagctcaaggaggcgttccgtgtctttgacaaggaccagaacggcttcatctcggcggctgaactccgccatgtgatgaccaacctcggggagaagctgacagacgaggaggtggatgagatgatccgggaggcggatgtggatggtgacggccagatcaactacgaggagttcgtcaaggtcatgatggccaagtga

SEQ ID NO: 3847 - protein, 149 aa, Hordeum vulgare
MADQLSEEQIGEFKEAFSLFDKDGDGSITTKELGTVMRSLGQNPTEADVQDMINEVDADGNGTIDFPEFLNLMARKMKDTDSEEELKEAFRVFDKDQNGFISAAELRHVMTNLGEKLTDEEVDEMIREADVDGDGQINYEEFVKVMMAK

SEQ ID NO: 3848 - DNA, 510 bp, Hordeum vulgare
  CDS (1)..(510)
atgtctacaatgaagggacagacaaggagggagaggcctagaactcgccctcatggcctcacacaacagaagaggcaggaaataaaggaagcatttgatcttttcgacaccgataactctggaaccatcgatgccaaagagttgaatgttgcgatgagagccttgggatttgagatgacagaagagcaaatcaatcagatgattgctgatgtagacaaagatggcagtggatcgatagattatgaggagtttgagcacatgatgactgccaagattggggagagggatactaaagaagagcttacaaaggcgttccgcattattgaccaagataaaaatgggaagatttcaaatgttgatattcagcgtattgccaaggagttgggtgagaacttcactctccaagagatccaagagatggttcaagaggcagatcaaaatggcgatggcgagatagattttggcgagtttgccaggatgatgaagaagaccagctatggtggttactag

SEQ ID NO: 3849 - protein, 169 aa, Hordeum vulgare
MSTMKGQTRRERPRTRPHGLTQQKRQEIKEAFDLFDTDNSGTIDAKELNVAMRALGFEMTEEQINQMIADVDKDGSGSIDYEEFEHMMTAKIGERDTKEELTKAFRIIDQDKNGKISNVDIQRIAKELGENFTLQEIQEMVQEADQNGDGEIDFGEFARMMKKTSYGGY

SEQ ID NO: 3850 - DNA, 444 bp, Linum usitatissimum
  CDS (1)..(444)
atggggaaggatctaagcgacgaccaggttcactcgatgaaagaggccttcgtcctcttcgacaccgacggcgacggaaaaatcgcgccctccgagctcgggatcctaatgcgatccctcggcggcaacccgacccaggcccagctcaaagccatcgtcaccgaggagaagctaaccgctcccttcgatttccaaaggttcctcgagatcatggggaagcacatgaaaaccgagcccttcgatcgccagctccgcgacgcgttcaaggtcctcgacaaggactccaccgggttcgtctcagtacaggatctgcgccacatcttgaccagcatcggggagaagctggagccggcagagttcgacgagtggatccgggaggtggatgtcgggtcggatgggaagatccggtatgaggatttcattgctaggatggtggctaagtga

SEQ ID NO: 3851 - protein, 147 aa, Linum usitatissimum
MGKDLSDDQVHSMKEAFVLFDTDGDGKIAPSELGILMRSLGGNPTQAQLKAIVTEEKLTAPFDFQRFLEIMGKHMKTEPFDRQLRDAFKVLDKDSTGFVSVQDLRHILTSIGEKLEPAEFDEWIREVDVGSDGKIRYEDFIARMVAK

SEQ ID NO: 3852 - DNA, 447 bp, Triticum aestivum
  CDS (1)..(447)
atggccggcaaggagctgagcgaggagcaggttgcgtcgatgcgggaggccttctccctcttcgacactgacggcgacggccgcatcgccccctcggagctcggcgtcctcatgcgctccctgggtgggaacccgacgcaggcgcagctccgcgacatcaccgcccaggagaagctcacggcgcccttcgacttcaagcgattcctcgaactcatgcgcgcccacctccgcccggagcccttcgaccgcccgctccgcgacgccttccgcgtcctcgacaaggacgcgtcgggcaccgtctccgtcgcggacctccgccacgtcctcacctccatcggcgagaagctcgagccccatgagttcgacgagtggatccgcgaggtcgacgtcgccgcggacggcaccatccgctacgacgacttcatccgccgcatcgtcgccaagtag

SEQ ID NO: 3853 - protein, 148 aa, Triticum aestivum
MAGKELSEEQVASMREAFSLFDTDGDGRIAPSELGVLMRSLGGNPTQAQLRDITAQEKLTAPFDFKRFLELMRAHLRPEPFDRPLRDAFRVLDKDASGTVSVADLRHVLTSIGEKLEPHEFDEWIREVDVAADGTIRYDDFIRRIVAK

SEQ ID NO: 3854 - DNA, 450 bp, Triticum aestivum
  CDS (1)..(450)
atggcggaccagctgagcgaggagcagattggcgagttcaaggaggccttcagcctcttcgacaaggacggcgatggcagcatcaccaccaaggagcttggaaccgtgatgcgctccctcggccagaaccctaccgaggcagagctgcaggacatgatcaacgaggtggatgcggacggcaacggcaccatcgacttcccagagttcctgaacctgatggcccgcaagatgaaggacacggactccgaggaggagctcaaggaggcgttccgcgtgtttgacaaggaccagaacggcttcatctctgcggcggagctccgccacgtgatgaccaacctcggggagaagctgacggaggaggaggtggaggagatgatccgcgaggccgacgtggacggcgatggccagatcaactacgaggagttcgtcaaggtcatgatggccaaatga

SEQ ID NO: 3855 - protein, 149 aa, Triticum aestivum
MADQLSEEQIGEFKEAFSLFDKDGDGSITTKELGTVMRSLGQNPTEAELQDMINEVDADGNGTIDFPEFLNLMARKMKDTDSEEELKEAFRVFDKDQNGFISAAELRHVMTNLGEKLTEEEVEEMIREADVDGDGQINYEEFVKVMMAK

SEQ ID NO: 3856 - DNA, 498 bp, Triticum aestivum
  CDS (1)..(498)
atggccggcgccggtgccgcagcagcgatcagctcggagcagatgagcgagttccgggaggccttcgccttcttcgacaaggacggcgacggctgcatcacggcggaggagctgtccacggtcatccgctccctgggccagtccccgacgcccgaggagctgcgggacatggtgcgcgacgtggacgccgacggcaacggcaccatcgagttcgccgagttcctggcgctcatgtcccgcaaggccgacgccgacgcggacgccgccgaccccgaggaggagctccgggaggccttcagggtgttcgacaaggaccacgacggccacatctccaaggccgagctgcgccacgtcatgatcagcctcggcgagaagctcaccgacgaggaggtggacgggatgatccaggaggccgacctcgacggcgacggcctcgtcaacttcgacgagttcgtcaggatgatgatgctctccgacgccgaccagcagcagcattga

SEQ ID NO: 3857 - protein, 165 aa, Triticum aestivum
MAGAGAAAAISSEQMSEFREAFAFFDKDGDGCITAEELSTVIRSLGQSPTPEELRDMVRDVDADGNGTIEFAEFLALMSRKADADADAADPEEELREAFRVFDKDHDGHISKAELRHVMISLGEKLTDEEVDGMIQEADLDGDGLVNFDEFVRMMMLSDADQQQH

SEQ ID NO: 3858 - DNA, 447 bp, Triticum aestivum
  CDS (1)..(447)
atggccggcaaggagctgagcgaggagcagattgcgtcgatgcgggaggccttctccctcttcgacactgacggcgacggccgcatcgccccctcggagctcggcgtcctcatgcgctccctgggtgggaacccgacgcaggcgcagctccgcgacatcaccgcccaggagaagctcacggcgcccttcgacttcaagcgattcctcgaactcatgcgcgcccacctccgcccggagcccttcgaccgcccgctccgcgacgccttccgcgtcctcgacaaggacgcgtcgggcaccgtctccgtcgcggacctccgccacgtcctcacctccatcggcgagaagctcgagccccatgagttcgacgagtggatccgcgaggtcgacgtcgccgcggacggcaccatccgctacgacgacttcatccgccgcatcgtcgccaagtag

SEQ ID NO: 3859 - protein, 148 aa, Triticum aestivum
MAGKELSEEQIASMREAFSLFDTDGDGRIAPSELGVLMRSLGGNPTQAQLRDITAQEKLTAPFDFKRFLELMRAHLRPEPFDRPLRDAFRVLDKDASGTVSVADLRHVLTSIGEKLEPHEFDEWIREVDVAADGTIRYDDFIRRIVAK

SEQ ID NO: 3860 - DNA, 447 bp, Triticum aestivum
  CDS (1)..(447)
atggccggcaaggagctgagcgacgagcaggttgcgtcgatgcgggaggccttctccctcttcgacactgacggcgacggccgcatcgccccctcggagctcggcgtcctcatgcgctccctgggtgggaacccgacgcaggcgcagctccgcgacatcaccgcccaggagaagctcacggcgcccttcgacttcaagcgattcctcgaactcatgcgcgcccacctccgcccggagccgttcgaccgcccgctccgcgacgccttccgcgtcctcgacaaggacgcgtcgggcaccgtctccgtcgcggacctccgccacgtcctcacctccatcggcgagaagctcgagccccatgagttcgacgagtggatccgcgaggtcgacgtcgccgcggacggcaccatccgctacgacgacatcatcccccgcatcgtcgccaagtag

SEQ ID NO: 3861 - protein, 148 aa, Triticum aestivum
MAGKELSDEQVASMREAFSLFDTDGDGRIAPSELGVLMRSLGGNPTQAQLRDITAQEKLTAPFDFKRFLELMRAHLRPEPFDRPLRDAFRVLDKDASGTVSVADLRHVLTSIGEKLEPHEFDEWIREVDVAADGTIRYDDIIPRIVAK

SEQ ID NO: 3862 - DNA, 519 bp, Zea mays
  CDS (1)..(519)
atgagtttcaaccagtctactgtcaaggggcaggccaggagggagaggcctagggctcgccctcatggcctgacgcagcagaggaggcaggaaataaaggaagcttttgatctgtttgatacagataactctggaaccattgatgcaaaagagctcaatgttgccatgagagccttgggatttgagatgactgaagagcaaattaggcaaatgattgctgatgttgacaaagatggcagtggagcgatcgactacgaggagtttgagcacatgatgactgccaaaatcggagagagggatagtaaagaggagctttcaaaagcattccgcattattgatcaagatggaaatggaaagatttctaacattgatatccagaggattgccaaagagctgggtgtaaatctcaccctcgatgagatccaagacatggtgcaagaggctgatagaaatggtgacggtgagatagactttgacgagttcatcaggatgatgaggaggaccagctttggctactag

SEQ ID NO: 3863 - protein, 172 aa, Zea mays
MSFNQSTVKGQARRERPRARPHGLTQQRRQEIKEAFDLFDTDNSGTIDAKELNVAMRALGFEMTEEQIRQMIADVDKDGSGAIDYEEFEHMMTAKIGERDSKEELSKAFRIIDQDGNGKISNIDIQRIAKELGVNLTLDEIQDMVQEADRNGDGEIDFDEFIRMMRRTSFGY

SEQ ID NO: 3864 - DNA, 459 bp, Zea mays
  CDS (1)..(459)
atggcggagaagctgacgccggagcaggtggacgagtgcaaggaaatcttcgacctgttcgacgccgacgaggacggtcgcatcgccacgggcgagctcgtgacggcgctgcgctccctgggccagaacgtggacgaggcggaggcgcggcgcttcctggaggacgcgggcatcgcggcgggcgccggcgacatcgacctcgcggcgttcctggccgtggcggcgcgcaagatgggcgccaggcagtcggaggcgcgcctcgccgagtgcttcgacgtgttcgacgacgcctgcagcgggtccatccccgcggagcagctgcggcaggtgatggtaagccacggcgaccgactcacggaggaggaggccgacgcgatgctccgcgaggccgacccgcgcggcgagggccgcatcgagtacaaacactacgtcaaagtgctgctcagggacaataagtga

SEQ ID NO: 3865 - protein, 152 aa, Zea mays
MAEKLTPEQVDECKEIFDLFDADEDGRIATGELVTALRSLGQNVDEAEARRFLEDAGIAAGAGDIDLAAFLAVAARKMGARQSEARLAECFDVFDDACSGSIPAEQLRQVMVSHGDRLTEEEADAMLREADPRGEGRIEYKHYVKVLLRDNK

SEQ ID NO: 3866 - DNA, 447 bp, Zea mays
  CDS (1)..(447)
atgggcggcaaggacctgacggaggaccagatcgcctcgatgcgggaggccttctcgctgttcgacacggacggggacggccgcatcgcgccctcggagctgggcgtcctcatgcggtccctcggcgggaaccccacgcaggcgcagctccgggacatcgcggcgcaggagaagctcaccgcgcccttcgacttcccgcgcttcctcgacctcatgcgcgcccacctcaagcccgagcccttcgaccgcccgctccgcgacgccttccgcgtcctcgacaaggacggctccggcaccgtcgccgtcgccgacctccgccacgtcctcacctccatcggcgagaagctcgaggcccacgagttcgacgagtggatccgcgaggtcgacgtcgcgcccgacggcaccatccgctacgacgacttcatcctccgcatcgtcgccaaatga

SEQ ID NO: 3867 - protein, 148 aa, Zea mays
MGGKDLTEDQIASMREAFSLFDTDGDGRIAPSELGVLMRSLGGNPTQAQLRDIAAQEKLTAPFDFPRFLDLMRAHLKPEPFDRPLRDAFRVLDKDGSGTVAVADLRHVLTSIGEKLEAHEFDEWIREVDVAPDGTIRYDDFILRIVAK

SEQ ID NO: 3868 - DNA, 510 bp, Zea mays
  CDS (1)..(510)
atggacctgctgaaccccgagcagatctccgagttccgggaggcgttcgcgttcttcgacaaggacggcgacgggtgcatcacggtggaggagctggcgacggtgatggggtcgctgcaggggcagcggcccagcgcggaggagctgcgcgagatgatccgcgacgccgacgccgacggcaacggcgccatcgacttcgccgagttcctgggcctcatggcgcgcaagaccgcggggggcggcgccggcggcggcgccgaccccgacgaggagctgcgcgaggcgttcaaggtgttcgacaaggaccagaacgggtacatctccgccaccgagctccgccacgtcatgatcaacctcggcgagaagctcacggacgaggaggtggagcagatgatccgcgaggccgacctcgacggcgacggccaggtcaactacgacgagttcgccaggatgatgatgctctccgacggcgccggcgccggcgccgcagccacgggccaccaccaatga

SEQ ID NO: 3869 - protein, 169 aa, Zea mays
MDLLNPEQISEFREAFAFFDKDGDGCITVEELATVMGSLQGQRPSAEELREMIRDADADGNGAIDFAEFLGLMARKTAGGGAGGGADPDEELREAFKVFDKDQNGYISATELRHVMINLGEKLTDEEVEQMIREADLDGDGQVNYDEFARMMMLSDGAGAGAAATGHHQ

SEQ ID NO: 3870 - DNA, 576 bp, Zea mays
  CDS (1)..(576)
atgggcaaggtgcgctccttcttctgccgcgcccgcagcggcaagcgcggtggctcccggccaggcttgtcgtcctcgtctctctcgtccccgtgcccctccgcgaggagggcgtcgccgccggccggggacgagacggagcgcgtcttccgcaagttcgacgcgaacggcgacggccagatctcgcggtccgagctggcggcgctgttcgagagcgtgggccacgcggccaccgacgacgaggtgtcgcgcatgatggaggaggccgacgcggacggcgacggctacatcagcctgcccgagttcgcggcgctcatggactcggcgtccggcgacgccgacgccgtcgaggaggacctgcgccacgccttctcggtcttcgacgccgacggcaacggcctcatcacccccgccgagctcgcgcgcgtcctgcgcggcctcggcgagtccgcctccgtcgcccagtgccgccgcatgatccagggcgtcgaccagaacggcgacggcctcatctccttcgacgagttcaaggtcatgatggccaggggaggaggatgcttcgcaaagatcgcctag

SEQ ID NO: 3871 - protein, 191 aa, Zea mays
MGKVRSFFCRARSGKRGGSRPGLSSSSLSSPCPSARRASPPAGDETERVFRKFDANGDGQISRSELAALFESVGHAATDDEVSRMMEEADADGDGYISLPEFAALMDSASGDADAVEEDLRHAFSVFDADGNGLITPAELARVLRGLGESASVAQCRRMIQGVDQNGDGLISFDEFKVMMARGGGCFAKIA

SEQ ID NO: 3872 - DNA, 552 bp, Zea mays
  CDS (1)..(552)
atggcggaccagcttagcgaggagcagattgccgagttcaaggaagctttcagcctcttcgacaaggacggcgacggttgcatcacaaccaaggagctcggaaccgtgatgcggtctctcgggcagaaccccaccgaggcggagctgcaggacatgatcgccgaggtggacagcaacggcagcggcaccatcgacgagcaggagttcctgggcctgatggcgcgcaagatgagggacgcggagtcggaggaggagctcagggaggcgttccgcgtgttcgacaaggaccagaacggggtgatctccgcggccgagctccggcacttgatgaccaacctcggggagaagctgagcgagcaggaggtggccgagatggtccgtgaggccgacgtggaccgcgacggccacatcaactacgacgagttcgtcaaggtcatgacggccaagcgaaggagcaagaggacggaggagaaggcgacgcgcggcaagaagaaaccggcggcggcgccgtccgacgccggcaagcgtggccagaaatgcgtgatcctgtga

SEQ ID NO: 3873 - protein, 183 aa, Zea mays
MADQLSEEQIAEFKEAFSLFDKDGDGCITTKELGTVMRSLGQNPTEAELQDMIAEVDSNGSGTIDEQEFLGLMARKMRDAESEEELREAFRVFDKDQNGVISAAELRHLMTNLGEKLSEQEVAEMVREADVDRDGHINYDEFVKVMTAKRRSKRTEEKATRGKKKPAAAPSDAGKRGQKCVIL

SEQ ID NO: 3874 - DNA, 705 bp, Zea mays
  CDS (1)..(705)
atgcagagcccccggcccgaagaagaccgcgtccgagacggcagcgcgaccgcaccgccacccgttctgcccgcgaccgcgaccacgtccaccaccaccgcccggacgaagcgctcggcgtccatgcccctctccggcgctagcgccgggaccggaagggacagggacccctccccggcaccggcaccggcaccggcgcccggcgggcgctcgcggctccgcgacgagcagttgagccagctccgggagctcttcatccgcttcgacctcgacggcgacgggagcctcaccaagctggagctggcggcgctgctccgctccctgggcctccgccccgcggccggggacgagatccacacgctcatcgccgccatggacgccgacggcaacggcaccgtggagttcgacgagctctcctcctccctggcgccgctgctcctggggccctgccgccccgccgtggccgtcgaccacgcgcagctcgccgaggccttccgcgccttcgaccgcgacggcaacggcttcatctccgccgccgagctcgcgcgctccatggcgctcatgggccaccccatctgctacgccgagctcaccgacatgatgaaagaggccgacaccgacggagacggcgtcatcagcttccaggagttcaccgccatcatggccaagtccgccgtcgacttcctaggcctcgctgctctgtga

SEQ ID NO: 3875 - protein, 234 aa, Zea mays
MQSPRPEEDRVRDGSATAPPPVLPATATTSTTTARTKRSASMPLSGASAGTGRDRDPSPAPAPAPAPGGRSRLRDEQLSQLRELFIRFDLDGDGSLTKLELAALLRSLGLRPAAGDEIHTLIAAMDADGNGTVEFDELSSSLAPLLLGPCRPAVAVDHAQLAEAFRAFDRDGNGFISAAELARSMALMGHPICYAELTDMMKEADTDGDGVISFQEFTAIMAKSAVDFLGLAAL

SEQ ID NO: 3876 - DNA, 450 bp, Zea mays
  CDS (1)..(450)
atggcggaccagctcaccgacgaccagatcgcgaagttcaaggaagcattcagcctcttcgacaaggacggcgacggctgcatcaccaccaaggaacttggaactgtgatgcgctcgttggggcagaaccctactgaggctgagcttcaggacatgatcaacgaggttgatgctgatggcaatggaaccatcgacttccctgagtttctcaacctgatggcacgcaagatgaaggacaccgactctgaggaggagctcaaggaggccttccgcgtgttcgacaaggaccagaacggcttcatctctgctgctgagcttcgacatgtcatgaccaacctaggtgagaagctgacggacgaggaggtggatgagatgattcgtgaagccgacgtggacggtgatggccagatcaactacgaggagttcgtgaaggtgatgatggccaagtga

SEQ ID NO: 3877 - protein, 149 aa, Zea mays
MADQLTDDQIAKFKEAFSLFDKDGDGCITTKELGTVMRSLGQNPTEAELQDMINEVDADGNGTIDFPEFLNLMARKMKDTDSEEELKEAFRVFDKDQNGFISAAELRHVMTNLGEKLTDEEVDEMIREADVDGDGQINYEEFVKVMMAK

SEQ ID NO: 3878 - DNA, 24 bp, Artificial sequence
  primer
atgtcctccaatcttaccgaagaa

SEQ ID NO: 3879 - DNA, 26 bp, Artificial sequence
  primer
ctatttagataacaaagcagcgaatt

SEQ ID NO: 3880 - protein, 162 aa, Artificial sequence
  consensus sequence
  Variant (2)..(2): Xaa in position 2 is any amino acid
  Variant (3)..(4): Xaa in position 3 to 4 is any or no amino acid
  Variant (6)..(6): Xaa in position 6 is any amino acid
  Variant (7)..(7): Xaa in position 7 is any or no amino acid
  Variant (9)..(10): Xaa in position 9 to 10 is any amino acid
  Variant (14)..(15): Xaa in position 14 to 15 is any amino acid
  Variant (18)..(18): Xaa in position 18 is any amino acid
  Variant (20)..(20): Xaa in position 20 is any amino acid
  Variant (21)..(21): Xaa in position 21 is any or no amino acid
  Variant (23)..(23): Xaa in position 23 is any amino acid
  Variant (25)..(27): Xaa in position 25 to 27 is any amino acid
  Variant (30)..(30): Xaa in position 30 is any amino acid
  Variant (31)..(33): Xaa in position 31 to 33 is any or no amino acid
  Variant (36)..(36): Xaa in position 36 is any amino acid
  Variant (39)..(40): Xaa in position 39 to 40 is any amino acid
  Variant (41)..(44): Xaa in position 41 to 44 is any or no amino acid
  Variant (46)..(47): Xaa in position 46 to 47 is any amino acid
  Variant (48)..(49): Xaa in position 48 to 49 is any or no amino acid
  Variant (51)..(56): Xaa in position 51 to 56 is any amino acid
  Variant (57)..(58): Xaa in position 57 to 58 is any or no amino acid
  Variant (60)..(61): Xaa in position 60 to 61 is any amino acid
  Variant (62)..(63): Xaa in position 62 to 63 is any or no amino acid
  Variant (65)..(65): Xaa in position 65 is any amino acid
  Variant (66)..(66): Xaa in position 66 is any or no amino acid
  Variant (68)..(68): Xaa in position 68 is any amino acid
  Variant (70)..(70): Xaa in position 70 is any amino acid
  Variant (73)..(73): Xaa in position 73 is any amino acid
  Variant (74)..(75): Xaa in position 74 to 75 is any or no amino acid
  Variant (77)..(85): Xaa in position 77 to 85 is any amino acid
  Variant (86)..(99): Xaa in position 86 to 99 is any or no amino acid
  Variant (101)..(103): Xaa in position 101 to 103 is any amino acid
  Variant (106)..(107): Xaa in position 106 to 107 is any amino acid
  Variant (110)..(110): Xaa in position 110 is any amino acid
  Variant (112)..(113): Xaa in position 112 to 113 is any amino acid
  Variant (115)..(115): Xaa in position 115 is any amino acid
  Variant (118)..(119): Xaa in position 118 to 119 is any amino acid
  Variant (120)..(120): Xaa in position 120 is any or no amino acid
  Variant (123)..(124): Xaa in position 123 to 124 is any amino acid
  Variant (126)..(127): Xaa in position 126 to 127 is any amino acid
  Variant (128)..(130): Xaa in position 128 to 130 is any or no amino acid
  Variant (134)..(134): Xaa in position 134 is any amino acid
  Variant (136)..(137): Xaa in position 136 to 137 is any amino acid
  Variant (138)..(140): Xaa in position 138 to 140 is any or no amino acid
  Variant (142)..(144): Xaa in position 142 to 144 is any amino acid
  Variant (147)..(147): Xaa in position 147 is any amino acid
  Variant (149)..(149): Xaa in position 149 is any amino acid
  Variant (151)..(151): Xaa in position 151 is any amino acid
  Variant (156)..(160): Xaa in position 156 to 160 is any amino acid
LXXXQXXEXXEAFXXFDXDXXGXIXXXELXXXXRSXLGXXXXXXPXXXXEXXXXXXXXDXXXXGXXIXFXEFXXXMXXXXXXXXXXXXXXXXXXXXXXXEXXXAFXXFDXDXXGXISXXXELXXVXXXXXLGEXLXXXXXEXXXMIXEXDXDGDGXXXXXEF

SEQ ID NO: 3881 - protein, 17 aa, Artificial sequence
  protein pattern
  Variant (2)..(4): Xaa in position 2 to 4 is any or no amino acid
  Variant (7)..(7): Xaa in position 7 is any amino acid
  Variant (8)..(8): Xaa in position 8 is Phe, Ile, Leu or Val
  Variant (9)..(9): Xaa in position 9 is any amino acid
  Variant (11)..(11): Xaa in position 11 is any amino acid
  Variant (12)..(12): Xaa in position 12 is Asp, Glu, Asn, Arg or Ser
  Variant (13)..(14): Xaa in position 13 to 14 is any amino acid
  Variant (16)..(16): Xaa in position 16 is any amino acid
  Variant (17)..(17): Xaa in position 17 is Ile, Leu or Val
EXXXAFXXXDXXXXGXX

SEQ ID NO: 3882 - DNA, 1815 bp, Saccharomyces cerevisiae
  CDS (1)..(1815)
atgtcagatcctatagtaacgtcttccaaaatggaaaaaagtgcagagtttgaagtaacagactctgctttatataataacttcaatacatcaacaacagcttcactaactccggagattaaggaacattctgaggaatctcgcaatgggttagttcacagattcgtcgactcattcagaagagccgaaagccaacgtttagaagaagacaatgacttggaggatggtaccaaatcgatgaaatctaataaccacttaaaaaagtcaatgaaatctagacatgttgtaatgatgtctttaggtacagggataggaacaggtcttctagttgccaacgccaaaggtttgagtcttgcaggcccggggtctttagtcatcggttacgttatggtgtccttcgtcacgtattttatggtccaagcggctggtgagatgggtgtcacttatccgacgcttccaggtaacttcaatgcatacaattcaatctttatttcaaagtcgtttgggttcgcgaccacttggttattttgcattcagtggttaactgtgctaccgttggaattgattacttcttccatgaccgtcaagtactggaatgacacaattaatgctgatgtattcattgtcattttctatgtgtttttattgtttatccacttttttggtgttaaggcatacggtgaaacggaatttatcttcaattcctgtaagatattgatggttgcaggattcattattttatcagtcgtcatcaattgtgggggagccggtgtggacggctatattggcggcaaatattggcgcgaccctggttcatttgcagaaggcagcggtgccactcgtttcaaagggatatgttatattctagtatctgcatatttctccttcggtggtattgaattatttgttctttccatcaatgagcagtctaaccctagaaaatccactcctgtagccgcgaagagaagtgtatatcgtattttgatcatttatttgctgacaatgattctaattgggttcaatgttcctcacaataacgatcaattgatgggttccggtggctccgcaacgcacgcttcaccatatgtcttggcagcctctattcacaaggttagggtcatcccccatatcattaatgctgttattttgatatcagtcatctctgttgcgaactctgccctttatgccgcaccgagattaatgtgttccttggctcaacagggctatgctccaaaatttttgaactatattgatagggagggaagacctttaagggccttggtagtgtgctctcttgttggtgtcgttggcttcgtcgcctgttctccacaggaagagcaagcatttacatggttggcagccattgcaggtttgagtgaacttttcacatggtcaggcattatgctttcacacattcgattcagaaaagcgatgaaagtccaaggaagatcacttgatgaagtcggctataaggccaataccggtatatggggttcatactatggggtttttttcaatatgcttgtctttatggcccaattttgggtcgcactgtctccaataggaaatggcggaaagtgtgatgctcaggcattcttcgagagttatctggctgccccgctatggatattcatgtatgttggatacatggtttacaaaagagattttacctttttaaacccactggacaagatcgacttggactttcatagaagagtttacgaccctgaaataatgaggcaggaggacgaagaaaataaagaaaggttaaagaactcttcaatattcgtcagagtctacaaattttggtgttag

SEQ ID NO: 3883 - protein, 604 aa, Saccharomyces cerevisiae
MSDPIVTSSKMEKSAEFEVTDSALYNNFNTSTTASLTPEIKEHSEESRNGLVHRFVDSFRRAESQRLEEDNDLEDGTKSMKSNNHLKKSMKSRHVVMMSLGTGIGTGLLVANAKGLSLAGPGSLVIGYVMVSFVTYFMVQAAGEMGVTYPTLPGNFNAYNSIFISKSFGFATTWLFCIQWLTVLPLELITSSMTVKYWNDTINADVFIVIFYVFLLFIHFFGVKAYGETEFIFNSCKILMVAGFIILSVVINCGGAGVDGYIGGKYWRDPGSFAEGSGATRFKGICYILVSAYFSFGGIELFVLSINEQSNPRKSTPVAAKRSVYRILIIYLLTMILIGFNVPHNNDQLMGSGGSATHASPYVLAASIHKVRVIPHIINAVILISVISVANSALYAAPRLMCSLAQQGYAPKFLNYIDREGRPLRALVVCSLVGVVGFVACSPQEEQAFTWLAAIAGLSELFTWSGIMLSHIRFRKAMKVQGRSLDEVGYKANTGIWGSYYGVFFNMLVFMAQFWVALSPIGNGGKCDAQAFFESYLAAPLWIFMYVGYMVYKRDFTFLNPLDKIDLDFHRRVYDPEIMRQEDEENKERLKNSSIFVRVYKFWC

SEQ ID NO: 3884 - DNA, 1815 bp, Saccharomyces pastorianus
  CDS (1)..(1815)
atgtcagatccaatcgtaacgtcttccaagatggagaagactgccgagttcgaagtaacggattcggccttacgtgataactttaatgcatcaacaacagcatcattttccccagaggtaaaagagcattccgaggaatctagaagtgggttagtccataggtttgtcgattcattcagaagggctgagagccaacgcctagaagatgataatgatttggaggatggtaccaggtctatgaaatccaataaccatctgaaaaaatcgatgaaatctagacatgtcgtcatgatgtctctaggaacaggtataggcacaggtctgctggtcgccaacgccaaaggtctgaaacttgccggcccgggatctttagtcattggttatgtcttggtctccttcgtcacatatttcatggtccaggcagctggtgaaatgggtgttacctatcccacgcttccgggcaatttcaatgcgtataactcaatcttcgtttctaaatcgtttgggttcgctaccacctggttattttgcatccagtggctgaccgtgctgccgttggagttgattacttcttcgatgaccatcaagtattggaacgacaccattaatgctgatgtgtttatcgtcatcttttatgtgtttttattgttcatccatttctttggtgttaaggcttacggtgaaactgaattcatctttaattcttgcaaaattttaatgattgccgggtttatcatcctatcagtcgttatcaattgtgggggtgctggtgtggacggctacattggtggaaagtattggcgtgatcctggttcatttgcggatggtagcagtgctactcgcttcaaagggatttgctttattcttgtgactgcgtatttctcctttggtggtattgaattgtttgttctttccatcaacgaacaggccaatccaagaaaatccacgcccgtggctgccaagagaagtatttaccgtattctgatcatttatttattgacaatgattttgattggcttcaatgttcctcacgataatgaccaattgatgggttccggtagttctgctacccacgcatctccttatgtgttagcagcctcgatccatggtgtcaaagtggttccacatattatcaatgctgttattttgatatctgttctctccgttgcgaactctgctctctacgctgcaccaaggttgatgtgttctttggctcaacagggctatgcaccaaaatttttaaactatatcgatagagaaggcagacctttacgtgccctaatagcgtgctcttttgtaggtctaattggtttcgttgcttgctctccacaagaagaacaagcttttacatggttggcggccatcgcagggttgagtgaaatttttacatggtcgggcattatgctttcccatattcgtttcagactagccatgaaagcgcagggaagatcacttgatgaaattggctataggtccaatactggcatatggggttctatttatggggttcttttcaacatccttgtcttcatggcacagttctgggtagcactgtcgccaccaggttctggcgggaagtgcgatgttgaatctttcttccaaagttatcttgctgcccctctatggatctttttgtatttgggttacatggtctacacaagagatttcacctttttgaatccgttggataaaattgatttagactttcacagaagagtttacgatcctgaaataatgagacaagaggatgaagaaaacaaagaaaggctgagaaattcttcactatttttcagaatgtacaatatgtggtgttaa

SEQ ID NO: 3885 - protein, 604 aa, Saccharomyces pastorianus
MSDPIVTSSKMEKTAEFEVTDSALRDNFNASTTASFSPEVKEHSEESRSGLVHRFVDSFRRAESQRLEDDNDLEDGTRSMKSNNHLKKSMKSRHVVMMSLGTGIGTGLLVANAKGLKLAGPGSLVIGYVLVSFVTYFMVQAAGEMGVTYPTLPGNFNAYNSIFVSKSFGFATTWLFCIQWLTVLPLELITSSMTIKYWNDTINADVFIVIFYVFLLFIHFFGVKAYGETEFIFNSCKILMIAGFIILSVVINCGGAGVDGYIGGKYWRDPGSFADGSSATRFKGICFILVTAYFSFGGIELFVLSINEQANPRKSTPVAAKRSIYRILIIYLLTMILIGFNVPHDNDQLMGSGSSATHASPYVLAASIHGVKVVPHIINAVILISVLSVANSALYAAPRLMCSLAQQGYAPKFLNYIDREGRPLRALIACSFVGLIGFVACSPQEEQAFTWLAAIAGLSEIFTWSGIMLSHIRFRLAMKAQGRSLDEIGYRSNTGIWGSIYGVLFNILVFMAQFWVALSPPGSGGKCDVESFFQSYLAAPLWIFLYLGYMVYTRDFTFLNPLDKIDLDFHRRVYDPEIMRQEDEENKERLRNSSLFFRMYNMWC

SEQ ID NO: 3886 - DNA, 1476 bp, Clostridium acetobutylicum ATCC 824
  CDS (1)..(1476): transl_table=11
atgacgtctaaaaaagaacaaaagaatgagcttaagagaacactgacggcaaggcatatgaatatgatcgcaataggaggctctgttggaactggacttttttttgcaagtggaagtgcaataagcacagcaggaccaggaggagcgcttcttgcatatataatcacgggaattctagtttatgtactaatgatgtcactaggagaaatgtcaacactattacctatttcgggttcttttgaaacctatgctactagatttgtagatccagcacttggatttactcttggctggaactactggttttcttggtccatatgtgtggcatcggaattagttgcaggatcacttatagtgaagttttggtttcctcatactaatacaaccatttggagcataggatttttacttgtaatttttatactaaatattctttctgctaaagcttatggagaaagcgaatattggttttcaagtattaaggtagttactataatcatatttatcatagttggagtacttatgatatttggaattatgggaaatgattcacctggttttaaaaattgggttatatcgggaaatggttcgagagcaccgtttgtaggtggaatagcagcaattataaatgtttttttagttgcaggcttttcgttttcaggtacagaaatagttggacttgcagctggagaaacagaaaatcctgaggaaaacgtcccaaaggcaattaaatctgttttttggcgtatactactattttatatttgtgcaattataataataggctttctagttccttttaatgacaagaatctattaaaaagtggagttaataatatagcatatagtccatttacaatggtatttgcaaagtgtggaatagcttttgcggcaagtgctatgaatgctgtaattttaacctcagtactttcttgcggaaactcaggactttatgtatcatcacgtatgctatattctcttgcaaaagaaggaaaagcacctaagtttttagcaaaggtaaacaagcaaggtgtacctatgaatgcgttatatgcaacaactttagttgcatcctctgcatttttgtcatcacttattggtgaaggaaagatatactatgttttatacaatgcatctggaataacagcattgtttgcatggcttggtataggaatctgtcattacaggtttagaaaagcttatgtagcgcaaggaagagatttaaaggacttgaagtttaaggctaagttttatccttatggtcctattatggcaatagtgttatgcgtagtaataatatttggagctaacatatggatatttcaggctccaaagttcagttggtttgattttataagtaattacatttgtattcctatatttatagcactatatatagcatataaatacattaagaaaactaagctagttccgcttgaggaatgcgattttgaatataacggaaaagataaataa

SEQ ID NO: 3887 - protein, 491 aa, Clostridium acetobutylicum ATCC 824
MTSKKEQKNELKRTLTARHMNMIAIGGSVGTGLFFASGSAISTAGPGGALLAYIITGILVYVLMMSLGEMSTLLPISGSFETYATRFVDPALGFTLGWNYWFSWSICVASELVAGSLIVKFWFPHTNTTIWSIGFLLVIFILNILSAKAYGESEYWFSSIKVVTIIIFIIVGVLMIFGIMGNDSPGFKNWVISGNGSRAPFVGGIAAIINVFLVAGFSFSGTEIVGLAAGETENPEENVPKAIKSVFWRILLFYICAIIIIGFLVPFNDKNLLKSGVNNIAYSPFTMVFAKCGIAFAASAMNAVILTSVLSCGNSGLYVSSRMLYSLAKEGKAPKFLAKVNKQGVPMNALYATTLVASSAFLSSLIGEGKIYYVLYNASGITALFAWLGIGICHYRFRKAYVAQGRDLKDLKFKAKFYPYGPIMAIVLCVVIIFGANIWIFQAPKFSWFDFISNYICIPIFIALYIAYKYIKKTKLVPLEECDFEYNGKDK

SEQ ID NO: 3888 - DNA, 1461 bp, Listeria monocytogenes EGD-e
  CDS (1)..(1461): transl_table=11
gtgaaaaaagaaacacatggcgagattcgtcgtgacttaaaaacaaggcatttgtccatgattgccattggtggttcgatcgggacgggattatttttagcaagtggtaatgcgattcatactgccggacctggtggcgcgttggttgcttatgttgcaatcgggattatggtgtactttttaatgacaagtttaggcgaaatggctacttacatgcctgtatctggttcatttagtacgtatgctagtcgatttgttgacccagctttcgggtttgcacttggttggaattattggtttaactgggcaattacgctagcagtcgatatttccaccgcggcgattattgttcaattttggctaccgaatactcctgcttggctatggagcgcgattttcttaattttgatttttggcttaaatgcgctttcggtaaaagcttacggagaatcagaatattggttttcgattattaaagtggccacggttattattttccttatcgtcggcgtgctaactattgttggaattcttggcggcgaagttattggcttttctaactttacagctggcgatgctccgtttaaaggtggtttttttgccatcttaggtaccttcttaattgctggattttctttccaagggactgaaatggttggtattgcggcaggtgaaagtgctactccagaaaccagtgtgccaaaagcgattaaacaagtgttctggcggattttgttattttatatttttgcgattttcattattgggatgattattccttatactaacccgaacttacttagtgccgaggcaactgatgtggcaattagcccatttacactcgtatttgaaaaagctggtcttgcatttgcggcttcagtgatgaatgcggttatcctgacttctgttctatctgctggtaattcaggtctttacgcttccaccagaatgctttgggcgatggctcgcgataaaaaagcacctaaattcttgggaaaagtaaaccgtcgtggtattccgatggcagcattaatcgttacgacgattgttggtgccatgacattcattacaacgctaacagaaaatggcacagtaatttatacgtggttactttctgcctctggtttaactggatttatcgcttgggtcggcatcgctatcagtcattaccgtttccgaaaagcatttatcaaacaagggcatgacttaagtgaactaaaatataaagcgaaatttttcccattcggacctattttagcacttgttttatgtattttagtcattgtcggtcaagattacgcggcatttttaaaaccagaatttacgaatccggcttggtggcaaaaaatcggcatttcgtatatcggtcttcccattttcctagttttttggctatcttttaaatttacaaataaaactaaagttattccactggaagactgcaaatttgatcaaaaataa

SEQ ID NO: 3889 - protein, 486 aa, Listeria monocytogenes EGD-e
MKKETHGEIRRDLKTRHLSMIAIGGSIGTGLFLASGNAIHTAGPGGALVAYVAIGIMVYFLMTSLGEMATYMPVSGSFSTYASRFVDPAFGFALGWNYWFNWAITLAVDISTAAIIVQFWLPNTPAWLWSAIFLILIFGLNALSVKAYGESEYWFSIIKVATVIIFLIVGVLTIVGILGGEVIGFSNFTAGDAPFKGGFFAILGTFLIAGFSFQGTEMVGIAAGESATPETSVPKAIKQVFWRILLFYIFAIFIIGMIIPYTNPNLLSAEATDVAISPFTLVFEKAGLAFAASVMNAVILTSVLSAGNSGLYASTRMLWAMARDKKAPKFLGKVNRRGIPMAALIVTTIVGAMTFITTLTENGTVIYTWLLSASGLTGFIAWVGIAISHYRFRKAFIKQGHDLSELKYKAKFFPFGPILALVLCILVIVGQDYAAFLKPEFTNPAWWQKIGISYIGLPIFLVFWLSFKFTNKTKVIPLEDCKFDQK

SEQ ID NO: 3890 - DNA, 1452 bp, Lactobacillus plantarum WCFS1
  CDS (1)..(1452): transl_table=11
atggcagaaaaacaacatcaggaagtgcatcgttccttacagacgcggcatttatccatgattgcattaggtggtagtatcgggaccgggctgtttgtcgcgtccggttcggcaatttcaacggctgggccagggggagcattactggcctacgttggtattggagtgatggtttactttttaatgactagtctgggcgaaatggcaacttatttgcccgtttcaggttcgttttccacgtatgccacgaagtttgttgacccggcacttgggtttgcgatgggctggaattactggttcaactgggcaatcacgttagcggtcgatattagtacggcggcgattgtcatgcagttctggttgccatccgtgccggggtgggtttttagtctgattgcgctcgttttgatttttacgatcaacgcgctgtcagtccggtcgtttggagaaactgagtactggctttcgctaattaaagtggtgaccgtgctcgtattcttggttatcggtgtcttgacgatcgtgggaatcatgggcggtcatgccactggcctcagtaactttacctataaaaaggcaccatttgtcggtggaattccaacgattttgagtgtcttcgtggtcgctggtttttcgtttcaaggaaccgaattaattgggatcacggccggggagtcagcaacaccggagaaaagtattccggcggctattaaacaagttttctggcgtattttgttattttacattttagccattttcgtgattgcggcgattattccttatacgtcgaaagatcttctagggtcatcagcgagcgatattgccatcagtccgttcacgttagtctttaaacgggctgggttggcggctgcggccagtgtgatgaacgcagtgatcttgacgtccgtattgtcagctgctaattcggggatgtacgcctcgacacggatgttatattctttgtcattacagggttatgcccccaagacatttggtcgggtcaatcgtcgtgggattccaatcatggcattattaggaacgacggtgattggattactcacgttcttgtcgagtctattcggtgaacggatttatattttcctcgtttcggccagtgggttaacgggttttatcgcttggctaggaatcgctatttcgcatctgcgtttccgtcgcgcgtttgttaagcaggggcatcaattgagtgaattgcggtaccatgccaagtggttcccatttggcccgtggttcgcctttatcttgtgtgtcgtggtcattattggtcaagacttacattcatttgcaacgcttgattggcaggctattggggtgacctatatgagcatcccgttattcatcatcttgtatgtctattataagattcgctatcatactaagatgattccgctagacaaggttgatttgacacgcaaacgacaccatcaagattaa

SEQ ID NO: 3891 - protein, 483 aa, Lactobacillus plantarum WCFS1
MAEKQHQEVHRSLQTRHLSMIALGGSIGTGLFVASGSAISTAGPGGALLAYVGIGVMVYFLMTSLGEMATYLPVSGSFSTYATKFVDPALGFAMGWNYWFNWAITLAVDISTAAIVMQFWLPSVPGWVFSLIALVLIFTINALSVRSFGETEYWLSLIKVVTVLVFLVIGVLTIVGIMGGHATGLSNFTYKKAPFVGGIPTILSVFVVAGFSFQGTELIGITAGESATPEKSIPAAIKQVFWRILLFYILAIFVIAAIIPYTSKDLLGSSASDIAISPFTLVFKRAGLAAAASVMNAVILTSVLSAANSGMYASTRMLYSLSLQGYAPKTFGRVNRRGIPIMALLGTTVIGLLTFLSSLFGERIYIFLVSASGLTGFIAWLGIAISHLRFRRAFVKQGHQLSELRYHAKWFPFGPWFAFILCVVVIIGQDLHSFATLDWQAIGVTYMSIPLFIILYVYYKIRYHTKMIPLDKVDLTRKRHHQD

SEQ ID NO: 3892 - DNA, 1872 bp, Candida glabrata CBS 138
  CDS (1)..(1872)
atgtctgattttaaagataattccgctgattttaatgataaagtcagtgataaagaggttgagtatatgtcacctcgtgaagtctctgtgactccggagacctctgctacaccaaatactccagccccatcccaatttagaagatttgttgactcattcaagagagctgaacaacaaaataactctgaaatcacctctgccgcttcttgtgatggtagttctgaaaacttggacaaagatggtaaagaagttgccgatcttgaagtacaagaaaatcaagttctcactgaaaagagtaatcaaaagaacaaagaattgaaacaaacaatcaaacctagacatgtcattcttatctctttgggtacaggtattggtacaggtttattggttggtaacgctaaggccctgcacaatgctggtcctgctggtcttctaattggttactctattatgggtacttgtctgtactgtattattcaagctgctggtgaattggctgtctcatacagttctctaagtggtggttttaatgtttatccttcattcttggttgaccctgcatttggtttctctgttgcttgggtatactgtatccaatggttatgtgtctgtcctttagaactggttaccgcctcgatgactattaagtattggactaccactgttaatgctgatatttttgttggtattttctacgtcttgatcattgtcattaatacttttggtgctcgtggttacgctgaagctgaattcttcttcaattgctgcaaaattctaatgatgattggcttctttatcctgggtattgtaatcaacactggtggtgctggtaatgatggctacattggtgacaggtactggcatacaccaggtgcctttgctggtgaccgtccaattgatcatttcaagggtatcatggctaccatggttactgccgcctttgcttttggtgccactgaattcatcgccttgactgctgccgagcaatcaaatccaagaaaggctattccatctgctgccaaaaaggttctttatagaattttgttcattttcttaggttcaatcactttggtcggtttcttggttccatatgactctgatcagttaatgggttctgggggttctgccacaaaggcctctccatatgttctggctgtttctacacatggtgtaaaagtcgttccacatttcattaatgctgtgatcctattgtcagttctatcggttggtaactctgctttctattccagttctcgtcttttgtactccttggcacaacaaggtaatgctccaaagttctttgactatgttgacagggaaggtagaccattcagagctatggtttgtgctggtgtatttgcaattatttccttctgtgctgcttctccaaaggaagaacaagttttcacctggttgttagctatttcaggtttatctcaagtatttacttggttcgccatttgcctatcccatattagattcagaaaggccatgtttgtacaaaagaggtctttgggagagattggtttcaaggctcagactggtgtttggggttcttactatgtctgtttcatgctggtcatgattttgattgctcagttctgggttgccattgcaccaattggtgaaggtaagttagacgcccaaggtttctttgagaattacttagctatgccaattttgattttattctacgttggttacaaaatttggaagaaggactggagcttgttcattagagcgaacaatattgacttggataagcacagacaaatttttgatgaagaattgttaaagcaagaagacgaagagtatagagagaagctaaagaatggtggctacctcaagagaatagctgccttctggtgttga

SEQ ID NO: 3893 - protein, 623 aa, Candida glabrata CBS 138
MSDFKDNSADFNDKVSDKEVEYMSPREVSVTPETSATPNTPAPSQFRRFVDSFKRAEQQNNSEITSAASCDGSSENLDKDGKEVADLEVQENQVLTEKSNQKNKELKQTIKPRHVILISLGTGIGTGLLVGNAKALHNAGPAGLLIGYSIMGTCLYCIIQAAGELAVSYSSLSGGFNVYPSFLVDPAFGFSVAWVYCIQWLCVCPLELVTASMTIKYWTTTVNADIFVGIFYVLIIVINTFGARGYAEAEFFFNCCKILMMIGFFILGIVINTGGAGNDGYIGDRYWHTPGAFAGDRPIDHFKGIMATMVTAAFAFGATEFIALTAAEQSNPRKAIPSAAKKVLYRILFIFLGSITLVGFLVPYDSDQLMGSGGSATKASPYVLAVSTHGVKVVPHFINAVILLSVLSVGNSAFYSSSRLLYSLAQQGNAPKFFDYVDREGRPFRAMVCAGVFAIISFCAASPKEEQVFTWLLAISGLSQVFTWFAICLSHIRFRKAMFVQKRSLGEIGFKAQTGVWGSYYVCFMLVMILIAQFWVAIAPIGEGKLDAQGFFENYLAMPILILFYVGYKIWKKDWSLFIRANNIDLDKHRQIFDEELLKQEDEEYREKLKNGGYLKRIAAFWC

SEQ ID NO: 3894 - DNA, 1839 bp, Candida glabrata CBS 138
  CDS (1)..(1839)
atgaactctaacgatctattgtccgaggttaaagtgtcttcttcggaagactctcaaatcctctccaagagtaacgactatgtacacgaacagaaccatatcatagaaggtgactacgatgatgacgataagtcgtcgtcatcgcataacctgaggtctaggttcgatgttcaagtcaagaacagacacttacagggattcatcgattctttcaagagggccgacgactctccagaccacaatgacctcgagaagaccaccaccgcacaccaggagcagaagaagaccatgaagtccaggcacgtcatcatgatgtccctgggtaccggtatcggtacgggtctgttggtctccaacggtaaaggtctgtccctggctggtcccgcctctttggtcatcgcatatggtctcgtctccttcgtcacttacttcatgatccaggcagccggtgagatggctgttacttacccaactctgcccggttccttcaacgcttacacttccttcttcatctcaaagcccttcggtttcgctacaacttggctgttctgcatccagtggctcaccgtgctgcctttggaattgatcacagcagctatgaccatcaagtactggaacacctccatcgacccagacgtcttcgtcattatcttctacgtgttcctgatgttcatccacttcttcggtgtgcaggcctatggtgaaacagaattcatcttcaacgcttgcaaaatcctcatgatcggtggcttcatcatcttcgctatcgtcgtcaactgcggtggtgccggtaaggacggctacatcggtggcaagtactggcacgacccaggtgccttcgcatcctcaaacggcgcatccagattcaaaggtatctgctacaacttggtcaacgcatacttctcctacggtggtaacgaactgttcgtcttgtccgtgaatgaccagaagaacccaagaaagtccaccccagcagcagccaagagtaacgtctaccgtatcgtggtcatctacttactaacaatgatcttgatcggtttcgttgtcccacacaacagctctgaactgctaggtgccagcggcggtaacggcttgcacgcatccccatacgtcttggcagcctccattcacggtatcaaagtcgtcccacatatcatcaacgcagtcatcttgatcgcattgatctcagtggccaactcctccttatacgccggccctagattactgagctccttggctcaacagggctacgccccaaggttcttgagttacgtcgacagaagaggcagacctttgaccgctttgctactttccgctttggtcggtgtcatcggtttcgcagctacctccccaagagaagaagaagtctttacgtggctcgctgccatctcaggtttaagtgaactgttcacatggacctccattatgttctcacacattagattcagaagagcaatgaagttgcaaaacaaatcgctagacacattgggatacaaagctaacactggcctgtggggttcttacttcggtgtaggtttcaatatccttgtgtttgctgctcaattctgggtcgccctatctccaccaaactccggtggtaaatgtgatgccaactccttcttcgcaagttacctagccatgccaatttggttggtgttctatttcggctacatgtgctggtacaaggacttcactgtcttgactgatttgaatcaagtggacttggataaccacagaaaagtttatgacccagaattcttgagacaggaagacctggaaaacaaagaaagattgagaaactcatcgttcttggtgaaaatctatgagttctggtgttaa

SEQ ID NO: 3895 - protein, 612 aa, Candida glabrata CBS 138
MNSNDLLSEVKVSSSEDSQILSKSNDYVHEQNHIIEGDYDDDDKSSSSHNLRSRFDVQVKNRHLQGFIDSFKRADDSPDHNDLEKTTTAHQEQKKTMKSRHVIMMSLGTGIGTGLLVSNGKGLSLAGPASLVIAYGLVSFVTYFMIQAAGEMAVTYPTLPGSFNAYTSFFISKPFGFATTWLFCIQWLTVLPLELITAAMTIKYWNTSIDPDVFVIIFYVFLMFIHFFGVQAYGETEFIFNACKILMIGGFIIFAIVVNCGGAGKDGYIGGKYWHDPGAFASSNGASRFKGICYNLVNAYFSYGGNELFVLSVNDQKNPRKSTPAAAKSNVYRIVVIYLLTMILIGFVVPHNSSELLGASGGNGLHASPYVLAASIHGIKVVPHIINAVILIALISVANSSLYAGPRLLSSLAQQGYAPRFLSYVDRRGRPLTALLLSALVGVIGFAATSPREEEVFTWLAAISGLSELFTWTSIMFSHIRFRRAMKLQNKSLDTLGYKANTGLWGSYFGVGFNILVFAAQFWVALSPPNSGGKCDANSFFASYLAMPIWLVFYFGYMCWYKDFTVLTDLNQVDLDNHRKVYDPEFLRQEDLENKERLRNSSFLVKIYEFWC

SEQ ID NO: 3896 - DNA, 1983 bp, Candida glabrata CBS 138
  CDS (1)..(1983)
atggtgtttggtggtagacgtcggaatgagaggtctcaatcaccggactcagaggaagccgatgtgagtaactatgagttgcacaacattgatgacagcaagaaaggatatgataacttaggtagtggtagcagaggtgctactacttctgccgttgaatattttgacaaagaaaatgttgatggcgtaaatatcgatgagaaattgcaatccactaccgaatttggcggtgatgagatgcctcgcggtaatatccgtcggttcatcgactctttcaaacgtgccgaacaacaacctaatcaacaacataatttggctgaggatttagaaaatgacttgaccactgcaatttccatgaactctttggatcgcgttcaaaataagccaaccggtaatggtcagatgaaattcgaggaagaagctttgaagaaatctattaagcctagacacgtcgtcatgatttccctaggtacaggtatcggtactggtctactggttggtaacgctaaagccctacataacgctggtccagctggtttagtcatcggttacgctattatgggttcttgtatctactgtattattcaagcagccggtgaaatggctgtcgtttactctaatttgctgggtggtttcaatacttacccatccatgttggttgaccctggttttggtttcgctgtcgcatgggtgtattgtctgcaatggttgtgtgtttgtcccttggaattggttactacttcgttgactatcaaatactggactacaacggtaaatccagacgcctttgtggtgatattttacgtggttattattttcattcaaatatttggtgccagaggttacgctgaagccgagttctttttcaactgttgtaagattcttatgattatcggtttctatatcttgggtattatcattaacgccggtggtgccggtaacgacggatacttgggtgctaagtactggcatgatccaggtgccttcagaggtacaaacggtattcaacgtttcaagggtattatggcgacttttgttagtgctgcttttgcttttggtgcaactgaatttattgcattgactgcagctgaacaatccaacccaagaaaggctatcccatctgcagctaagaaggtcctttaccgtgttatttgtatctttgttggtactatcgctttgctaggtttcttggtcccatgggattctgatcaattaatgggtgctggtggtagtgccactaaggcttctccttatgtcttagccatttctattcatggtgttagagttgttccacatttcattaacgctgttatcttaatctctgttttctctgtcgcaaattctgccttttactcaagttctcgtctattattgggtctagctcagcaaggctatgctccaaagtttttcgattacgttgacaggcaaggtagacctttcagagccatgtgttgtgctgctctttttggtgtcattgctttctgtgccgcatcaccaaaggaagaccaagtctttacttggttgctagccatttctggtttgtctcaattgtttacttggattgccatctgtgtttctcatattagatttagaagagctatgactgtccaaggtagatcattgggtgagattggtttcaaggcacaacttggtgtctatggttcatactacgccaccattatgatggtgctggctttgattgctcaattctgggttgccattgctccaattggtaacaacggtgacctggacgcagaaggtttctttgaaaactatttggctatgccaattttgattgcgttctactttggttacaaactttggaagagggactggcgtctgtttattagagcaaaggatattgatctagactcttacagacaggtatttgacgaagaactattgaaacaagaagatgaagaatacaaagagaaattaaagaatggccctatgtggaagagagtggtcgatttctggtgttag

SEQ ID NO: 3897 - protein, 660 aa, Candida glabrata CBS 138
MVFGGRRRNERSQSPDSEEADVSNYELHNIDDSKKGYDNLGSGSRGATTSAVEYFDKENVDGVNIDEKLQSTTEFGGDEMPRGNIRRFIDSFKRAEQQPNQQHNLAEDLENDLTTAISMNSLDRVQNKPTGNGQMKFEEEALKKSIKPRHVVMISLGTGIGTGLLVGNAKALHNAGPAGLVIGYAIMGSCIYCIIQAAGEMAVVYSNLLGGFNTYPSMLVDPGFGFAVAWVYCLQWLCVCPLELVTTSLTIKYWTTTVNPDAFVVIFYVVIIFIQIFGARGYAEAEFFFNCCKILMIIGFYILGIIINAGGAGNDGYLGAKYWHDPGAFRGTNGIQRFKGIMATFVSAAFAFGATEFIALTAAEQSNPRKAIPSAAKKVLYRVICIFVGTIALLGFLVPWDSDQLMGAGGSATKASPYVLAISIHGVRVVPHFINAVILISVFSVANSAFYSSSRLLLGLAQQGYAPKFFDYVDRQGRPFRAMCCAALFGVIAFCAASPKEDQVFTWLLAISGLSQLFTWIAICVSHIRFRRAMTVQGRSLGEIGFKAQLGVYGSYYATIMMVLALIAQFWVAIAPIGNNGDLDAEGFFENYLAMPILIAFYFGYKLWKRDWRLFIRAKDIDLDSYRQVFDEELLKQEDEEYKEKLKNGPMWKRVVDFWC

SEQ ID NO: 3898 - DNA, 1905 bp, Candida glabrata CBS 138
  CDS (1)..(1905)
atgttttccaaggtgaagaattatgggtcttcatctaagaaggaatccacagcggaggagttcaccataccggagtactccagggatgacggcgagaagtacgctggaaatagtaatgactacagccagcgcgacagcgataatacatctatagagtcagaaccaagaactaagcttgtacataggtttgtcgactctttcaagagagcacaggatgtgcccacaggccgtaagagcaaagaaatcggcaacaatggcggatccaagactaaaggtggctttgaagaggattctcttgacctagaaggttctgaccatgactccataataactaacacacatttgaagaaagcgatgaagtccagacatgttatgatgatgtctttaggtacgggtatcggtactggtctgttggtcgctaacgctaagggtctgcacttcggtgggcccgctgcgttggtcatcggttatgttctagtttcctttgtcacatatttcatgattcaagcagcaggtgaaatggctgtcacatacccaactcttcctggtaatttcaatgcatacagttccatttttgtctcaaatgcgttcggttttgccacagtctggattttctgtatccaatggttaactgtcctaccgctagaattgattactgcctccttgactataaagtattggaacgacaaaataaacgctgatgttttcatcgtgattttctatgtcttcctgttgtgtatccatctattcggtggtgttatcgcctacggtgaaactgaattcctgttcaacctatgtaaaattctcatggtcattggttttattatcatgtccattgttattaacgcaggtggtgcaggtaacagggagtacatcggtggcaaattctggcacgatccaggtgcttttgccggtaaaactgcaggttcaaggttcaaaggtatttgttacgttttggtcagtggttacttctcttacggtggtactgaactgtttgccctatctgtcaatgaacaatcaaatccaagaagatctactccacaagcttctaagagtagtttataccgtattttgattatttacttattgacaatgattttgatcggcttcaatgtgccttatgacagtgacgaattgatgggttcaggtggctctgctactcacgcttctccatatgtcttggctgcatcattgaatggagttaaaattgctcctcattttatcaatgccgtcatcttgatctccgttatttctgttgccaattcatctctatacgctgcaccaagattgatgtgttctttggctcagcaaggttacgctcctaaatttttggattatgtggacagacaaggtagacctttgcttgcgttgatcgcttgtttgcttgttggtgtcattggtttcgttgccgcctctcctaaggaagaagaagtctttacttggttggctgccattgcaggtttaagtgaacttttcacctggtcatccatcatgttgtctcatgttagatttagaatggcaatgaagttacagaacagaagtttggaagaattaggatataaagccactactggtatctatggttccatatatggtgtttgcttcaacttgttagtcttcgcagcccagttttggaccgctctgttcccatttggtggcgatggtaaagctaatgctaactctttctttgctaactatctagctatgccaatctggctagtcttttacttcggttacatgctgtggacacgtgatttccaattattaaaaccacttgataaaatagatcttgactttcatagaagaatttatgatccagaactaatgagacaagaggatgaagaatctaaggaaagactaaggaatggctcttttatgatgagaatgtatcatttctggtgttaa

SEQ ID NO: 3899 - protein, 634 aa, Candida glabrata CBS 138
MFSKVKNYGSSSKKESTAEEFTIPEYSRDDGEKYAGNSNDYSQRDSDNTSIESEPRTKLVHRFVDSFKRAQDVPTGRKSKEIGNNGGSKTKGGFEEDSLDLEGSDHDSIITNTHLKKAMKSRHVMMMSLGTGIGTGLLVANAKGLHFGGPAALVIGYVLVSFVTYFMIQAAGEMAVTYPTLPGNFNAYSSIFVSNAFGFATVWIFCIQWLTVLPLELITASLTIKYWNDKINADVFIVIFYVFLLCIHLFGGVIAYGETEFLFNLCKILMVIGFIIMSIVINAGGAGNREYIGGKFWHDPGAFAGKTAGSRFKGICYVLVSGYFSYGGTELFALSVNEQSNPRRSTPQASKSSLYRILIIYLLTMILIGFNVPYDSDELMGSGGSATHASPYVLAASLNGVKIAPHFINAVILISVISVANSSLYAAPRLMCSLAQQGYAPKFLDYVDRQGRPLLALIACLLVGVIGFVAASPKEEEVFTWLAAIAGLSELFTWSSIMLSHVRFRMAMKLQNRSLEELGYKATTGIYGSIYGVCFNLLVFAAQFWTALFPFGGDGKANANSFFANYLAMPIWLVFYFGYMLWTRDFQLLKPLDKIDLDFHRRIYDPELMRQEDEESKERLRNGSFMMRMYHFWC

SEQ ID NO: 3900 - DNA, 1902 bp, Zygosaccharomyces rouxii
  CDS (1)..(1902)
atgaggcccgaggatactataacaccttatgagctacaggacgttaagggagaagctgtatccgcttctcgtagtccgccagataatgaggtcgaatattttgataaattaggtgacgctcgtcaatacacatcgaatcttgagggcgaaggtacgccaacggaaggtgtatcaagacataggattaagaatcctctatttcgtaattttatcgattctttcaaaaggggtgaaaccacagcacgtatagctgatttggagaatgatttgactactgcagtatcaccacaactatccaattaccacggtagtataccttcagatgaagtcgtgatcaaaaaggaggaattaaagcgtgacatcaaccagcgtcacatggtgtttatggcaattggttctggtgtcggtactggtttactggttggtaacgcatctacattgaactcagctggtcctgctggtctacttattggttatgctcttatgggtacttgtgtttactgtgtgatccaagctgcaggtgaactgggggttacttatgctaacctaattggtggtttcaatgcgtatcctgcaatcttagttgcaccatcctttgcattttcagtcggttggatctacactttacaatggttatgtatgacaccattagaattggttacagcttcgttaacgatcaaatattggacgacaaaggtagatccggatgtatttgtggttatcttttatctgttgatcttgctgattaactttttcggttctaaaggttatgcagaagctgatttcttctttaactgtatgaaattggcaatgatttcagggtttttcatattaggtattgtggttgcttgtggtggtgcaggtcacgacggttatttaggtggaaaatactggcataatccaggtgctttcagaggtgagaaggcaatcgatcatttcaaaggtgtttcttccgtctttgtcacttctgcttttgcctttggtggtagtgaatttgtcgctctatccgcatctgaacaggccaatccaagaaaatcaattccatctgcagctaagttgattctttacagaattatttgggtctacttaacatccattaccatcttaggatttttggttccttgggatagtccacaattgcaaccttctagtgatggtaaaaaaacttcaccatatgttgttgccattgccatgcacggtgttaaagttgttcctcatttgattaatgccgttattctaatggctgttttgtctgtctccaattctgctttcttctacagttctcgtctacttctttctttgtctcaacgtggttatgctcccaagtggtttgattacgtcgacagaaagggtagacctgtaagggctatgttaatatctgctctattcggtgttatctgtttctgtgctacttctaagaaggaaactgatgttttcagttggttactggctatttctggtttgtctaccatttttacctatttctccatttgtgtgtcacacattagaatgagatctgccatgaaagtacaaggaagatccttgggtgagcttggattcagatctcaagtcggtacctacggttccttttacgcatgcctcttgttggtattgtcattgatggcagaattttgggttgcacttgcccccattggtgagggcaaattagatgcagagagtttcttcgagaattacttggcagcacctattggaattgtattctacttcggttatatgatttggaaaaaagactttaggattttcattagatcaaaggatatagatttggatttcaagagacaagtgtttgatgaggatttgattaaacaagaagatgaagagtacgcagaacaaatgagaaacgctccacgctggcgcaaagttatagctttcttgttttag

SEQ ID NO: 3901 - protein, 633 aa, Zygosaccharomyces rouxii
MRPEDTITPYELQDVKGEAVSASRSPPDNEVEYFDKLGDARQYTSNLEGEGTPTEGVSRHRIKNPLFRNFIDSFKRGETTARIADLENDLTTAVSPQLSNYHGSIPSDEVVIKKEELKRDINQRHMVFMAIGSGVGTGLLVGNASTLNSAGPAGLLIGYALMGTCVYCVIQAAGELGVTYANLIGGFNAYPAILVAPSFAFSVGWIYTLQWLCMTPLELVTASLTIKYWTTKVDPDVFVVIFYLLILLINFFGSKGYAEADFFFNCMKLAMISGFFILGIVVACGGAGHDGYLGGKYWHNPGAFRGEKAIDHFKGVSSVFVTSAFAFGGSEFVALSASEQANPRKSIPSAAKLILYRIIWVYLTSITILGFLVPWDSPQLQPSSDGKKTSPYVVAIAMHGVKVVPHLINAVILMAVLSVSNSAFFYSSRLLLSLSQRGYAPKWFDYVDRKGRPVRAMLISALFGVICFCATSKKETDVFSWLLAISGLSTIFTYFSICVSHIRMRSAMKVQGRSLGELGFRSQVGTYGSFYACLLLVLSLMAEFWVALAPIGEGKLDAESFFENYLAAPIGIVFYFGYMIWKKDFRIFIRSKDIDLDFKRQVFDEDLIKQEDEEYAEQMRNAPRWRKVIAFLF

SEQ ID NO: 3902 - DNA, 1830 bp, Saccharomyces uvarum
  CDS (1)..(1830)
atgccattatcagaagactttggatcttctggtaagaaagaggcttcgccagattccatttcaatacgctcctttagtgctgtgaacaaccttcagtcatcgtcaagtgaaaaaaattattctggacaaacaacccggaacaacaaacttatacataggttcgtggactcattcaaaagagcagaaggtagcactacacataccaagcaaataaatgagaatacatcagatttagaaggtgatgttaattccttcacgtcggactccaagctgaaaaagtccatgaaatcccgtcacgtcgtcatgatgactctggggacaggtatcggtacgggtcttttggttgccaatgctaagggtcttcattacggtgggcccgccgcattggttatcggttatttcttggtttcgtttgtcacatatttcatgattcaagcagctggtgaaatggccgtcacttatccgactttaccagcaaattttaacgcatactcctccatattcatctccaagccgtttgggtttgccacagtatgggtttactgtttccaatggctaactgttttacccctagagttgatcaccgctgccatgactattaaattttggaatgatacgataaatcccgatattttcattcttatcttctttgttttcttacttttcattcatttctttggtgtgaaaggttatggtgaaacagagtttatcttcaactgctgtaaaattttaatgatagcgggcttcatcattctttccgttgtcattaactgtggtggtgccggaaacgatggttacattggtggcaaatattggcgcaacccaggtgcatttgctggtgacacttcggcgggcaggttcaaaaacgtttgctatattttagttaccgcttacttttcttttggtggtatggaattatttgctttaagtgttcaagaacaggcgaatccaagaaagacaacccctgtggctgctaagagaagtatatatcgtatcctcgttatctacctactaactatgattttaattggattcaacgttccatataatgacgatcaattgatgggtgctggtgggtccgccacacatgcatctccttatgtgctagcggcctccatccatggcgtcaaagtggttccacatatcatcaatgctgttattttgatatctgttatctccgtcgcgaactcctccctatatgcgggcccaagattgatgtgctctttggcccagcaaggttacggacccaaattcttggattacgtcgacagagagggtagaccattaatagctctaattgtgtgtagtgttttcggtgtcatagggtttgttgcagcctcgtccaaggaagaggtcgtgtttgcatggctagctgccatcgcaggtttgagtgaactattcacctggacttccattatgttatcccatttacgttttagacaagcaatgaaagtacaaggaagatctctggatgagttaggatataaagctacaaccggtatttggggttccgcatacggggtcttcttcaatatcttggtgttcattgcccaattctgggtggccttggctcccctgaataatggtggtaaatgcagtgcggagtccttttttcaaagctatctggcttttccaatctggatagctttctacctcgggtatatgatctacaaccgcgacttcacctttttgaatcccctcgataagatcgatctagacttccacagacatatttacgatccagaactgatgagacaagaagacttggaaaatgaagaaaggaaaagagacatgtcgctgatgagaaagacttaccttttctggtgttga

SEQ ID NO: 3903 - protein, 609 aa, Saccharomyces uvarum
MPLSEDFGSSGKKEASPDSISIRSFSAVNNLQSSSSEKNYSGQTTRNNKLIHRFVDSFKRAEGSTTHTKQINENTSDLEGDVNSFTSDSKLKKSMKSRHVVMMTLGTGIGTGLLVANAKGLHYGGPAALVIGYFLVSFVTYFMIQAAGEMAVTYPTLPANFNAYSSIFISKPFGFATVWVYCFQWLTVLPLELITAAMTIKFWNDTINPDIFILIFFVFLLFIHFFGVKGYGETEFIFNCCKILMIAGFIILSVVINCGGAGNDGYIGGKYWRNPGAFAGDTSAGRFKNVCYILVTAYFSFGGMELFALSVQEQANPRKTTPVAAKRSIYRILVIYLLTMILIGFNVPYNDDQLMGAGGSATHASPYVLAASIHGVKVVPHIINAVILISVISVANSSLYAGPRLMCSLAQQGYGPKFLDYVDREGRPLIALIVCSVFGVIGFVAASSKEEVVFAWLAAIAGLSELFTWTSIMLSHLRFRQAMKVQGRSLDELGYKATTGIWGSAYGVFFNILVFIAQFWVALAPLNNGGKCSAESFFQSYLAFPIWIAFYLGYMIYNRDFTFLNPLDKIDLDFHRHIYDPELMRQEDLENEERKRDMSLMRKTYLFWC

SEQ ID NO: 3904 - DNA, 1746 bp, Penicillium chrysogenum
  CDS (1)..(1746)
atggaggagaagaagtttgaggccgtccaaactggcgcggaggcccccccagcttatggcgactcatctccaacgcggggaggcataggccaacgaatctttgacagtttcaagagagaccccaatcatacagtcaccggtcatgttggagctgatggctctggattcgacgctgagactgccgcccataacactgctcactccccgttgcagcgtcgcttgaagggtcgtcatctgcagatgattgctatcggtggttctatcggtactggtcttttcgttggttccggatctgttttggccaccggtggtccagcctcagtattgattgcctatatcttgatcggatgcatgctttattgtacagttcatgcattgggtgaaatggcagttctcttccccgttgccggttctttcgcccattattcaactcgtttcgtcgatcctgcttggggttttgccatgggctggaactacgctcttcagtggcttatcgtcttacccttggagatcgtcgctgcttctatcacggtcgattattggaacccaggggtttcaaatgccgcctgggtaactattttctgggttatgattgtctcaatcaacttattcggtgtgcgaggatatggtgaagctgaatttgtcttctccctcattaaggtcattgccgttattggtttcattatacttggaatcatcctcaactgcggtggtggaccccaaggtggatacatcggcgccaggtactggtacgacccaggtgcatttaggaacggtttcaagggtctctgcagtgtctttgtcaatgccgcatttgcctttgctggaaccgaacttgttggtcttgctgccgccgaaaccaccaatcctcgcaagtcccttccgacagccgttaagcaagtcttctggcgtattgctctcttctacatagtttcccttacccttgtcggcctcctagtgagatatgacgacgagagacttatcagcggtagctcttccgccgatgccaaggcctctcccttcgtcattgctattgagaacgcaggaattaaggctttgccttcgatcatgaatgtcgtgattatgattgcggtcctgtctgtcggcaattcctccgtctatggatcctcacgtactcttgctgcccttgccgagcagggccaagcccccaagttcctagcatacattgaccgcaagggacgtcctctacccgccattatcattgcatctatattgggtctgctttcctacctcgccgcctctgacgtgcagactaccgccttcgaatggatgatggccatctcgggtctgtcatctattttcaccggggttccgtgtgtccgtgcccacatcctcttccgtcgcgcatggaaaaaacagggccacagcctggacgaactggctttccgttcccaacccggcgtcattggctcgtgggtcggtttcattttcaactgtctcgtgctggttgcccagttctgggttgggttcgcccccattggttacgcagacatgacctctcaggagattgcctacaaattcttctctgtctacttggccgcccccgtggttctgatttgctacatcggttataagatcatgtacaagaccaagtttgttcgcacgtccgaggtggatttggtcaccggtcgtcgcgaccttgatatccagcatttaattgagcaggagatggccgagcaaagagaatggcccaagtggaagaaggtttataagttcttctgttaa

SEQ ID NO: 3905 - protein, 581 aa, Penicillium chrysogenum
MEEKKFEAVQTGAEAPPAYGDSSPTRGGIGQRIFDSFKRDPNHTVTGHVGADGSGFDAETAAHNTAHSPLQRRLKGRHLQMIAIGGSIGTGLFVGSGSVLATGGPASVLIAYILIGCMLYCTVHALGEMAVLFPVAGSFAHYSTRFVDPAWGFAMGWNYALQWLIVLPLEIVAASITVDYWNPGVSNAAWVTIFWVMIVSINLFGVRGYGEAEFVFSLIKVIAVIGFIILGIILNCGGGPQGGYIGARYWYDPGAFRNGFKGLCSVFVNAAFAFAGTELVGLAAAETTNPRKSLPTAVKQVFWRIALFYIVSLTLVGLLVRYDDERLISGSSSADAKASPFVIAIENAGIKALPSIMNVVIMIAVLSVGNSSVYGSSRTLAALAEQGQAPKFLAYIDRKGRPLPAIIIASILGLLSYLAASDVQTTAFEWMMAISGLSSIFTGVPCVRAHILFRRAWKKQGHSLDELAFRSQPGVIGSWVGFIFNCLVLVAQFWVGFAPIGYADMTSQEIAYKFFSVYLAAPVVLICYIGYKIMYKTKFVRTSEVDLVTGRRDLDIQHLIEQEMAEQREWPKWKKVYKFFC

SEQ ID NO: 3906 - DNA, 1830 bp, Saccharomyces pastorianus
  CDS (1)..(1830)
atgccattatcagaagactttggatcttctggtaagaaagaaacctcgccggattccatttcggtacgttcctttagtgctgggaacaaccttcagtcattgacaagtgaaaaaagttattccagagactcaaccgggaacgacaaacttatacatagatttgtggactcatttaagagggcagaaagtagcactacaaagaccaagcaaataaacaagaacacttcagatttagaagaggatgttcattcctttacgtcggactccgacttgaaaaagtccatgaaatcccgtcacgtcgtcatgatgtcgctggggacaggtatcggtacgggtcttttggttgctaatgctaagggtcttcattacggtgggccagccgcattggttatcggctatgttttagtttcctttgtcacatatttcatgattcaagctgctggtgagatggctgtcacttatccgactctaccagcaaatttcaatgcatactcctccatattcgtctccaagccgtttgggttcgccacagtatggctttactgtttccaatggctaaccgttttacccctagagttaatcaccgcatccatgacagttcaattttggaacgataaaatcaatgctgatattttcattctaatcttctttgttttcttacttttcgtccatttctttggtgtgaaagcatacggtgagacagagtttattttcaactgttgtaaaattttaatgatagcgggcttcatcattctttccgttgtcattaactgtggtggtgccggaaatgatggttacattggtggcaaatattggcgtaacccaggtgcatttgctggtgactcttcggcttccaggttcaaaaacatttgctatattttagttaccgcctatttttcgtttggtggtatggaattatttgcattaagtgttcaagaacaggagaatccaagaaagtcgacccctgtggcagctaagagaagcatataccgtatcctcattatctaccttttaactatgattttgattgggttcaatgttccgtataatgatgatcaattgatgggatctggcgggtccgctacacacgcatctccctatgtgttggcagcctccatccatggtgtcaaagttgttccacatattatcaatgctgttattttaatttctgtcatttcagtgtccaactcctccctatatgcgggcccaagattaatgtgctctttggcccagcaaggctacgcacccaaattcttagattacatcgacagagagggtagaccattaagagctttaattgtgtgtagtatttttggcaccgttgcgtttgtcgcagcctcgtccaaggaagaggtcgtgtttacatggctagcagccatcgcaggtttgagtgaactattcacctggacttccatcatgttatctcactttcgttttagacaagcaatgaaagtacaaggaagatctttagatgagttaggatataaagctacatccggtatttggggttccgcatacggagtcttcttcaatatcttggtgttcattgctcaattctgggtggccttggcccccttgggtaatggtggtaaatgtagtgtggagtcctttttcgagagctatctggctgctccaatttggctagctttctacctcgggtatatgatctacaaccgcgatttcacctttttgaaccccctcgacaagatcgatctagacttccacagacgtgtttacgatccagagctgatgagacaagaagatttggaaaataaagaaaaaaaaaaacacatgccgctaatgaaaaaggcttaccttttctggtgttga

SEQ ID NO: 3907 - protein, 609 aa, Saccharomyces pastorianus
MPLSEDFGSSGKKETSPDSISVRSFSAGNNLQSLTSEKSYSRDSTGNDKLIHRFVDSFKRAESSTTKTKQINKNTSDLEEDVHSFTSDSDLKKSMKSRHVVMMSLGTGIGTGLLVANAKGLHYGGPAALVIGYVLVSFVTYFMIQAAGEMAVTYPTLPANFNAYSSIFVSKPFGFATVWLYCFQWLTVLPLELITASMTVQFWNDKINADIFILIFFVFLLFVHFFGVKAYGETEFIFNCCKILMIAGFIILSVVINCGGAGNDGYIGGKYWRNPGAFAGDSSASRFKNICYILVTAYFSFGGMELFALSVQEQENPRKSTPVAAKRSIYRILIIYLLTMILIGFNVPYNDDQLMGSGGSATHASPYVLAASIHGVKVVPHIINAVILISVISVSNSSLYAGPRLMCSLAQQGYAPKFLDYIDREGRPLRALIVCSIFGTVAFVAASSKEEVVFTWLAAIAGLSELFTWTSIMLSHFRFRQAMKVQGRSLDELGYKATSGIWGSAYGVFFNILVFIAQFWVALAPLGNGGKCSVESFFESYLAAPIWLAFYLGYMIYNRDFTFLNPLDKIDLDFHRRVYDPELMRQEDLENKEKKKHMPLMKKAYLFWC

SEQ ID NO: 3908 - DNA, 1806 bp, Saccharomyces kluyveri
  CDS (1)..(1806)
atgtcaaaaaaatccctagagaacttaagcaacgaaaagttgccggccacagaatgtggttcttctaactcaaatcttcgagaaagcatttcttctaacgacctcagtgacggagatcgtggtttcgtgaaccgcaagcttcacaacttttgtaattcctttaagagagctaatagtgacacttttgacgcatcacaagatctggaaggcgcatccataaattcggtacgatcaaactcaaaatttaaacagagcatgaagtccaggcacgtcgtcatgatgtctctaggtaccggtattggtaccggtttgttggtcgccaacggtaaatctttgcattttggtgggcctgctggtctattgattgggtactcgttggtgtctgttgttgcctatattatgatgcaagcagctggtgaaatggccgtcgcttatccaacccttcccgggaacttcaatgtgtactcttcaatctttatctccaaatcattcgggtttgctaccgtatggctttattgcttacagtggttgactgttctaccattggagttgattaccgcatcgttaacgataaaatactggaatagttcaatcaaccctgacgcctttatcgccattttttacgcagttatcgttttcattcatttcttcggtgcagccggttacggtgaagccgaatttatctttagtacttgcaaagtgtcgatgattgccggatttattatcctgagtattgtgattaactgtggtggtgcgggtactggcggctacattggcggtgaatattggcgcaaccctggtgcctttgctggtggctctccaattggtcatttcaaaggtattgcctacgttctggtgaccgcctacttttcgtacggtggtatggaattgttcgctctaacagtcaatgaacaggccaaccctagaaaagccgtgccatcagctaccaagaagtgtatctaccgtattctgataatttacatgttgacaatgatcttaattgggtttttggtgccatacaacagtgacgaattgatgggttcttctggtaaatctgcgacacacgcgtcgccttatgtcattgccgttgcatcacacggtgtcaaagttgttccacacatcatcaatgctgttattttaatctctgtcgtttctgtcggtaattctgccatgtattctgctcctagactgctcaattctttagccgagcagggctacgctccaaaaattttcagctatgtggatagagcaggtagaccattggttgcattggttggctgttccattttcggccttttgtcctttgttgctgcttccgataaggaagaacaagtcttcacttggttggctgccattgcaggtttaagcgaacttttcacctggtctgctatctgtctatctcacgtcagattcagagatgctatgaagtatcaagggtactccttgagtgaattggggtacaagtctaagactggctactgggggtccatatacgcaatcttcttcaacataattgtcttcgttgctcaattctgggttgccttggcacccattggtaatggtgggaaggcagacgctgaagcctttttccagagttacctggccttccctatctggatatcctgttatgttggttacaaaatctacagtaaagagtggaaactgcttgttccccttgatgaaattgatctaaacagccatagacacatttttgataaacacattttgcagcaagaagacgatgaacataaggaaaaattgaaaaactccggatggtgggtcaaaatggctaatttttggtgctaa

SEQ ID NO: 3909 - protein, 601 aa, Saccharomyces kluyveri
MSKKSLENLSNEKLPATECGSSNSNLRESISSNDLSDGDRGFVNRKLHNFCNSFKRANSDTFDASQDLEGASINSVRSNSKFKQSMKSRHVVMMSLGTGIGTGLLVANGKSLHFGGPAGLLIGYSLVSVVAYIMMQAAGEMAVAYPTLPGNFNVYSSIFISKSFGFATVWLYCLQWLTVLPLELITASLTIKYWNSSINPDAFIAIFYAVIVFIHFFGAAGYGEAEFIFSTCKVSMIAGFIILSIVINCGGAGTGGYIGGEYWRNPGAFAGGSPIGHFKGIAYVLVTAYFSYGGMELFALTVNEQANPRKAVPSATKKCIYRILIIYMLTMILIGFLVPYNSDELMGSSGKSATHASPYVIAVASHGVKVVPHIINAVILISVVSVGNSAMYSAPRLLNSLAEQGYAPKIFSYVDRAGRPLVALVGCSIFGLLSFVAASDKEEQVFTWLAAIAGLSELFTWSAICLSHVRFRDAMKYQGYSLSELGYKSKTGYWGSIYAIFFNIIVFVAQFWVALAPIGNGGKADAEAFFQSYLAFPIWISCYVGYKIYSKEWKLLVPLDEIDLNSHRHIFDKHILQQEDDEHKEKLKNSGWWVKMANFWC

SEQ ID NO: 3910 - DNA, 1752 bp, Saccharomyces kluyveri
  CDS (1)..(1752)
atgagctcggatatgtccaccgcaaattccaaaaaagaagaggagtctacgtatgcgattattcaaacatcctcaccttgctctaaaaagtattcctatatttccggacaggttaacaggtttattaattcttttagaagaaaaggtgagagtgaagatgttaaggaattgaaaggagagaatgaggaatgtggggctgccaccaaaatgaaaaaaagcatcaaatctcgtcatttattgatgatatcactaggtaccggtattggcacaggtttgcttgttggaaatggtaaggcactggccaaagctggacctgcaggtttagttatagggtatgcagttgcctcgattatgctatactgtattatccaggccgctggtgagttgggtatttgttattctgggatggctggtaactacacggcgtattcgtcactgttggtagaccccgctttaggtttttcagtttcctgggtctactgtgtgcaatggatgacagttttacctctacaattggttaccgctgcaatgactgttagatactggacaaatgccaacccggacatatttgtcgctgtatttttcgttgtaataatggtgattaatatgtttggtgctaaaggttatgctgaagcagagttcctgttcaacatatgcaaagtattgatgattgctgggtttgttatcttgggtattgctataaattgtggcggtgccggtaccagtggatatattggtgctaagtattggcattcgccaggttcatttgctgctggttttaaaggtgtttgttacgtgttctgttacgcagcttttagctacggtggtattgaagtcatggtattgacagctagtgagcaagaaaatccaaggaaatctatcccaaatgcttgtaagaaagtcatttaccgtatactgatgatttacatgctgactacaatcattgtatgtttcctagttccatacaacagcagcgagttgatgggttcttccggcgagtctgcatcacatgcctccccacttgtcattgctgttgcatcgcatggtgttaagatcgtcccacatattataaatgccgtcatattaatctcggtcatttctgttggcaactcctcaatgtattctgctcctagactattactatctctgtctgagcaaggttacgctccaaaatttttaaattacgtggatagacaaggtagaccattgatttgttttgccattaccttgctagttgcgttaattgcatttgtcgccgcgtccgacgccgaagaggatatatttgcttggctattggcgatctcagggttatcccaaatcttcatctggacttccatatgcctttcccatgttagattcagagatgcgatgcacgcacaaggtctttctttgggacaaatcggttacaaatcacaaacaggttattggggttcgtggtttgccatagttataagtgttttggtgttaattgcccagttctgggttgcaattgcaccaattggtgaagaaggtagattaaatgcagaaacatttttccagaattacttggctttcccaattttgttgggtgcttactttggctataaagtttatcacaaagactggagattatgcattccagcaagtgaggtagatttgtcctcccacagaaatatatctgatgaagagatattgagacaagaagattacgaatggaatgagaagatgtccaattcttccatttgggttaggctgtgccatttttggtgctga

SEQ ID NO: 3911 - protein, 583 aa, Saccharomyces kluyveri
MSSDMSTANSKKEEESTYAIIQTSSPCSKKYSYISGQVNRFINSFRRKGESEDVKELKGENEECGAATKMKKSIKSRHLLMISLGTGIGTGLLVGNGKALAKAGPAGLVIGYAVASIMLYCIIQAAGELGICYSGMAGNYTAYSSLLVDPALGFSVSWVYCVQWMTVLPLQLVTAAMTVRYWTNANPDIFVAVFFVVIMVINMFGAKGYAEAEFLFNICKVLMIAGFVILGIAINCGGAGTSGYIGAKYWHSPGSFAAGFKGVCYVFCYAAFSYGGIEVMVLTASEQENPRKSIPNACKKVIYRILMIYMLTTIIVCFLVPYNSSELMGSSGESASHASPLVIAVASHGVKIVPHIINAVILISVISVGNSSMYSAPRLLLSLSEQGYAPKFLNYVDRQGRPLICFAITLLVALIAFVAASDAEEDIFAWLLAISGLSQIFIWTSICLSHVRFRDAMHAQGLSLGQIGYKSQTGYWGSWFAIVISVLVLIAQFWVAIAPIGEEGRLNAETFFQNYLAFPILLGAYFGYKVYHKDWRLCIPASEVDLSSHRNISDEEILRQEDYEWNEKMSNSSIWVRLCHFWC

SEQ ID NO: 3912 - DNA, 1788 bp, Saccharomyces castellii
  CDS (1)..(1788)
atggaaagttctaagaagaatgaaacttctccggaagtgaatagtataacctcttccactttgaagactccaaacgttacagagaaattcgaaccatatccagacactacagctgtcaagcacagaacacatttcaacagattcgttgactcattcaagagagctgaagtaaaccataatggtatagatcttgaagatggtaccaactcaatacaatccgatgataatttaaagaaggccatgaagtccagacacgtcattatgatgtctctagggacgggtatcggtaccgggttgttggtcgccaacgctaagggtctttatttggctggtcctgcatctttagtcattgggtactttatggtctccttcattacatatttcgtcattcaagccgcaggtgaaatggccgtcacatatccaactttaccaggtgggtttaataattacgcttccattttcgtttctaaaccattcggtttcgctaccgtgtggcttttctgtattcaatggttgaccgtcttacctttggaattgattaccgcatccatgactattaaatattggaatgataagattaatgcagatgtcttcgtcgtcatactctacgtgtttttattattcattcatttctttggtgtcagagcatacggtgaggctgaatttattttcaattcatgtaagattctcatgattggagggttcgtcatcctaagtatcgtcgttaattgtggtggagctggtgttgatggatacattggtggcaaatattggcgtgatccaggtgcatttgcatcagataacgcagcttccagatttaaaggtgtggcatttgtccttgtcactgcttatttctcatatggtggtgtcgaattattcgcattgtctgttaatgaacaagaaaatccaagaagatccacccctgctgctgccaagcaaagtatctaccgtatccttatcatttatttgttaaccatgatcttaatcggtttcaacgtcccacataacagtgatcaattgatgggtgctggtggatctgccactcatgcatccccctacgtgttggctgtctccatccacggtgttaaagtggttcctcatatcatcaacgcagtcatcttaatttcagtgacttctgtggctaattccgcattgtatgcatctccaagattactaagatcattagctgaacaagggtacgcacctaaatacttcaattatgtcgatagagaaggtagaccattacgtgcgctaatcttatgtagtatctttggtgtcattgcattctgtgcctgttccgatcaagaagaagtcatcttcacatggttagctgccattgcagggttaagtgaattatttacatggtcctccatccttctatcacatgttcgtttcagattggccatgaaagcccagggcaagtccttgaacgaattagggtatatatcaattactggtatttgggggtccctttacggttgtttcttcaacgttttggtgtttattgcccaattctgggtcgcgctaagtcctcctggtagtaaaggtgtctacagcgcggaagcttttttcgaaagttatttggcattccccgtttggttgttcttctatttaggatacatgctttacagtagagatttcacattcttgaccgatttgaaaaagattgatctagacaaccatagacgcctctacgatcctgaactattgagacaagaagatgaagaaaccaaggagagaataaggaatggtggctggacgcagaagctgttaaatttctggtgttag

SEQ ID NO: 3913 - protein, 595 aa, Saccharomyces castellii
MESSKKNETSPEVNSITSSTLKTPNVTEKFEPYPDTTAVKHRTHFNRFVDSFKRAEVNHNGIDLEDGTNSIQSDDNLKKAMKSRHVIMMSLGTGIGTGLLVANAKGLYLAGPASLVIGYFMVSFITYFVIQAAGEMAVTYPTLPGGFNNYASIFVSKPFGFATVWLFCIQWLTVLPLELITASMTIKYWNDKINADVFVVILYVFLLFIHFFGVRAYGEAEFIFNSCKILMIGGFVILSIVVNCGGAGVDGYIGGKYWRDPGAFASDNAASRFKGVAFVLVTAYFSYGGVELFALSVNEQENPRRSTPAAAKQSIYRILIIYLLTMILIGFNVPHNSDQLMGAGGSATHASPYVLAVSIHGVKVVPHIINAVILISVTSVANSALYASPRLLRSLAEQGYAPKYFNYVDREGRPLRALILCSIFGVIAFCACSDQEEVIFTWLAAIAGLSELFTWSSILLSHVRFRLAMKAQGKSLNELGYISITGIWGSLYGCFFNVLVFIAQFWVALSPPGSKGVYSAEAFFESYLAFPVWLFFYLGYMLYSRDFTFLTDLKKIDLDNHRRLYDPELLRQEDEETKERIRNGGWTQKLLNFWC

SEQ ID NO: 3914 - DNA, 1782 bp, Saccharomyces castellii
  CDS (1)..(1782)
atgccaagaaacgttatacaaccgaacaaggaaaagactgtggactattcgtcgacagaatatcttccaaacgagttagaatctccatcattcaacctcgatgcaactgaggaatctagatctggtctagttcacagattcgtcgactcattcaagagggctcaagattctacagaaaatgatctcgaagatgggacgaaaccattaggtgatgcttcacatttaaagaaggccatgaagtcaagacatgtcatcatgatgtgtgttggtaccggtatcggtacgggtcttctagtggctaatgcttcagggctatcctacggggggcccggttcattagttattggttatgtattggtttcctttgttacttatttcatgattcaagccgcaggtgaaatggccgtcgcataccctacattaccgggaaatttcaattcttatacatcaatgttcatttctaaaccattcggtttcgctacagtatggttatttttcatccaatggttaactgtgttcccattagaattgatcaccgcatcattaactatcaaatactggaatgataaaatcaatgctgatgtattcattgtcatcttctacgtgttcttattatttattcatttctttggtgtcaaagcttacggtgaagctgaatttatcttcaattcatgtaaagttctgatgattgctgggtttatcatattatcaatcgtaatcaactgtggtggtgcaggtaaagatggttatattggtgcaaaatattggagagatccaggttcttttgctgaaggtgattccgtggaaaaatttaaaggtatttgttacatcttagtcaccgcatatttctcctatggtggtgctgaattattctcattatctgtcaatgaacaagagaatccaagaaaatctacccctcaagctgccaaacaaagtatataccgtatcttaatcatttatttgttgacaatgattttaattgggtttaacgtccctcataataacgatcaactaatggggtcgggtggatccgcaacacatgcatccccatacgtcctggccgcatcaattcatggtgttaaagtggttcctcattttatcaatgctgtcattttgatctctgttatttctgtcgcaaattcagctctttatgcatctccaagattgatgtgttcccttgctgaacaaggttatgctccaaaattcttagattatgttgacagagaaggtagaccattacgtgctctaatactttgtgctgtttttggtgtcattgggtttgtctctgcatcatccaaggaggaagaagtcttcacttggttagctgccattgcagggttaagtgaacttttcacttggtcaggaattatgctttctcacgtccgttttagacaatgtatgaaactacatggtagatccgaggaagaaattggtttcagagctgttactggtatctgggggtcaatgtacgggatctcctttaacatgctggtgttcattgcccaattttgggtcgctcttgccccaccaagtcttcatggtaaagtagatgctgagtcattcttccaaagttacttagctgcaccaatttggctattcttttacttcggctacatgctttataagagagatttcacatttttagtcccactggataaaattgacctaaatttccacagaagaatctatgatcctgaactgataagacaggaagatgaagaaaataaggaaaaaatcaaaaattcctctgtgtgggttagaatgttccatttctggtgctaa

SEQ ID NO: 3915 - protein, 593 aa, Saccharomyces castellii
MPRNVIQPNKEKTVDYSSTEYLPNELESPSFNLDATEESRSGLVHRFVDSFKRAQDSTENDLEDGTKPLGDASHLKKAMKSRHVIMMCVGTGIGTGLLVANASGLSYGGPGSLVIGYVLVSFVTYFMIQAAGEMAVAYPTLPGNFNSYTSMFISKPFGFATVWLFFIQWLTVFPLELITASLTIKYWNDKINADVFIVIFYVFLLFIHFFGVKAYGEAEFIFNSCKVLMIAGFIILSIVINCGGAGKDGYIGAKYWRDPGSFAEGDSVEKFKGICYILVTAYFSYGGAELFSLSVNEQENPRKSTPQAAKQSIYRILIIYLLTMILIGFNVPHNNDQLMGSGGSATHASPYVLAASIHGVKVVPHFINAVILISVISVANSALYASPRLMCSLAEQGYAPKFLDYVDREGRPLRALILCAVFGVIGFVSASSKEEEVFTWLAAIAGLSELFTWSGIMLSHVRFRQCMKLHGRSEEEIGFRAVTGIWGSMYGISFNMLVFIAQFWVALAPPSLHGKVDAESFFQSYLAAPIWLFFYFGYMLYKRDFTFLVPLDKIDLNFHRRIYDPELIRQEDEENKEKIKNSSVWVRMFHFWC

SEQ ID NO: 3916 - DNA, 1857 bp, Saccharomyces bayanus
  CDS (1)..(1857)
atgaacgacagcgacagtctctttgtcgacgaggccaatccagctccatgtacacatggtctgcacgagagagggcacgcggaaaaggagaagaaggacttcacagtgactgaaaaccaagatgaaggactacaacagcaagcgaagcgccaagggacgagtgggaaattcaaactacaaaacgaatgcaaaaaattcttcgactcgttcaaaagacagctgccagcggatcaaaattccgaactagagtcacaagaaaggaacaatttgacaaggtccatcaaatcacgccatttgatcatgatcagtctcggcaccggtatcggtacggggctgctggtcgggaatggccaagttctcggaacggcaggacccgccgggttggtgcttggttatggtatcgcctctatcatgctttactgtatcatccaagccgccggtgaactgggtctttgttatgccgggttaaccggtaattacaccaggtactcttccattttggtcgacccttcattggggtttgccgtttccgtggtttataccatccaatggttgaccgttcttcctttgcagttggtcacggcagcgatgactatcaaatattggaccaatgtgaacgcagacatctttgttgccgcagttttcatttttgtcatcatcatcaacttgtttgggtccaaaggctatgccgaagctgaattcatgtttaatatctgtaaaattctgatggtaatcggattcgtgatcctggccattgtcatcaattgcggtggtgcaggtgataggaaattcatcggtactaaatactggcacaatcctggtccatttgctcacggtttcaaaggtgtctgtactgttttttgttatgccgccttcagttacggtggtatcgaagtcctgcttctatcagcagccgagcaagagaacccaacaaaatccattccaaacgcttgcaaaaaagttgtgtatcgtatcttgttcatttacatgttgacgaccattttgatttgcttcctggtaccatacaacagtgacgaattattaggctctggtagctcttccgggtcacatgcatctccatttgtcattgctgttgcgtcccacggtgtcaaagtcgtgcctcacttcatcaatgctgtgattttgatttctgttatttctgtggctaattcttcgttatattctgcaccaaggctactactatcgttggcagaacaagggtttttacctaaatgtctggcgtatgttgacagaaacggcagacctttgctttgttttcttgtttctattatctttgggtgcatcggctttgttgccacgagtgacgctgaagaacaggttttcacatggttattagccatttccagtctttcccaattgtttatttggatgtcgatgtctctgtcacatattagattcagagacgccatggccaagcaaggccgttcaatggacgaggtgggatacaaagcacaaacaggctactggggatcttggcttgcggttttgattgcgttatttttcctagtttgccagttttgggtcgccatcgcacccgttagcaaacatggtaaattggatgctaatgttttcttccagaattatttggcaatgcccattgtcttgtttgcctatttcggccacaagatctacaccaaatcgtggaagttttggattccagccgaaaaaatcgatttggactcacacagaaccatatacgtcccaccaatactcatggggactaacaagattgatgacgatgatcttaaagaatatgaaacttcagagtcatcggaaaacccgaacggctcaggctcaagaaagtttttcaagagaatggctaatttctggtgttaa

SEQ ID NO: 3917 - protein, 618 aa, Saccharomyces bayanus
MNDSDSLFVDEANPAPCTHGLHERGHAEKEKKDFTVTENQDEGLQQQAKRQGTSGKFKLQNECKKFFDSFKRQLPADQNSELESQERNNLTRSIKSRHLIMISLGTGIGTGLLVGNGQVLGTAGPAGLVLGYGIASIMLYCIIQAAGELGLCYAGLTGNYTRYSSILVDPSLGFAVSVVYTIQWLTVLPLQLVTAAMTIKYWTNVNADIFVAAVFIFVIIINLFGSKGYAEAEFMFNICKILMVIGFVILAIVINCGGAGDRKFIGTKYWHNPGPFAHGFKGVCTVFCYAAFSYGGIEVLLLSAAEQENPTKSIPNACKKVVYRILFIYMLTTILICFLVPYNSDELLGSGSSSGSHASPFVIAVASHGVKVVPHFINAVILISVISVANSSLYSAPRLLLSLAEQGFLPKCLAYVDRNGRPLLCFLVSIIFGCIGFVATSDAEEQVFTWLLAISSLSQLFIWMSMSLSHIRFRDAMAKQGRSMDEVGYKAQTGYWGSWLAVLIALFFLVCQFWVAIAPVSKHGKLDANVFFQNYLAMPIVLFAYFGHKIYTKSWKFWIPAEKIDLDSHRTIYVPPILMGTNKIDDDDLKEYETSESSENPNGSGSRKFFKRMANFWC

SEQ ID NO: 3918 - DNA, 1830 bp, Saccharomyces bayanus
  CDS (1)..(1830)
atgccattatcagaagactttggatcttctggtaagaaagaggcttcgccagattccatttcaatacgctcctttagtgctgtgaacaaccttcagtcatcgtcaagtgaaaaaaattattctggacaaacaacccggaacaacaaacttatacataggttcgtggactcattcaaaagagcagaaggtagcactacacataccaagcaaataaatgagaatacatcagatttagaaggtgatgttaattccttcacgtcggactccaagctgaaaaagtccatgaaatcccgtcacgtcgtcatgatgactctggggacaggtatcggtacgggtcttttggttgccaatgctaagggtcttcattacggtgggcccgccgcattggttatcggttatttcttggtttcgtttgtcacatatttcatgattcaagcagctggtgaaatggccgtcacttatccgactttaccagcaaattttaacgcatactcctccatattcatctccaagccgtttgggtttgccacagtatgggtttactgtttccaatggctaactgttttacccctagagttgatcaccgctgccatgactattaaattttggaatgatacgataaatcccgatattttcattcttatcttctttgttttcttacttttcattcatttctttggtgtgaaaggttatggtgaaacagagtttatcttcaactgctgtaaaattttaatgatagcgggcttcatcattctttccgttgtcattaactgtggtggtgccggaaacgatggttacattggtggcaaatattggcgcaacccaggtgcatttgctggtgacacttcggcgggcaggttcaaaaacgtttgctatattttagttaccgcttacttttcttttggtggtatggaattatttgctttaagtgttcaagaacaggcgaatccaagaaagacaacccctgtggctgctaagagaagtatatatcgtatcctcgttatctacctactaactatgattttaattggattcaacgttccatataatgacgatcaattgatgggtgctggtgggtccgccacacatgcatctccttatgtgctagcggcctccatccatggcgtcaaagtggttccacatatcatcaatgctgttattttgatatctgttatctccgtcgcgaactcctccctatatgcgggcccaagattgatgtgctctttggcccagcaaggttacggacccaaattcttggattacgtcgacagagagggtagaccattaatagctctaattgtgtgtagtgttttcggtgtcatagggtttgttgcagcctcgtccaaggaagaggtcgtgtttgcatggctagctgccatcgcaggtttgagtgaactattcacctggacttccattatgttatcccatttacgttttagacaagcaatgaaagtacaaggaagatctctggatgagttaggatataaagctacaaccggtatttggggttccgcatacggggtcttcttcaatatcttggtgttcattgcccaattctgggtggccttggctcccctgaataatggtggtaaatgcagtgcggagtccttttttcaaagctatctggcttttccaatctggatagctttctacctcgggtatatgatctacaaccgcgacttcacctttttgaatcccctcgataagatcgatctagacttccacagacatatttacgatccagaactgatgagacaagaagacttggaaaatgaagaaaggaaaagagacatgtcgctgatgagaaagacttaccatttctggtgttga

SEQ ID NO: 3919 - protein, 609 aa, Saccharomyces bayanus
MPLSEDFGSSGKKEASPDSISIRSFSAVNNLQSSSSEKNYSGQTTRNNKLIHRFVDSFKRAEGSTTHTKQINENTSDLEGDVNSFTSDSKLKKSMKSRHVVMMTLGTGIGTGLLVANAKGLHYGGPAALVIGYFLVSFVTYFMIQAAGEMAVTYPTLPANFNAYSSIFISKPFGFATVWVYCFQWLTVLPLELITAAMTIKFWNDTINPDIFILIFFVFLLFIHFFGVKGYGETEFIFNCCKILMIAGFIILSVVINCGGAGNDGYIGGKYWRNPGAFAGDTSAGRFKNVCYILVTAYFSFGGMELFALSVQEQANPRKTTPVAAKRSIYRILVIYLLTMILIGFNVPYNDDQLMGAGGSATHASPYVLAASIHGVKVVPHIINAVILISVISVANSSLYAGPRLMCSLAQQGYGPKFLDYVDREGRPLIALIVCSVFGVIGFVAASSKEEVVFAWLAAIAGLSELFTWTSIMLSHLRFRQAMKVQGRSLDELGYKATTGIWGSAYGVFFNILVFIAQFWVALAPLNNGGKCSAESFFQSYLAFPIWIAFYLGYMIYNRDFTFLNPLDKIDLDFHRHIYDPELMRQEDLENEERKRDMSLMRKTYHFWC

SEQ ID NO: 3920 - DNA, 1902 bp, Saccharomyces bayanus
  CDS (1)..(1902)
atgtcctcgtcgacgtcgccatacgaactgaaggacttgaaaaatagctccactgaagtacatgccgcggagcaggagaacgaaatcgagtatttcgaaacagactccaatgaccgtccctcgcagcagcctcatctggactacgagcaacacaacacctctgccgtgcgtcggttcctcgactccttcaagagggccgaccaggatcaagagcaggaggcagaagtggcacagatgaacgacctcacgtccgccatttcgccctcgtccagacaggctcacgagctggagaaggacgagactactgacaagatagctcctcacacgggccacaaatccgactcgctgaagaagaccatccagcccagacacgtgcttatgattgcgctcggtaccgggatcggtaccgggctactggtgggtaatggtacagcgctggtgcatgcgggccccgctgggctgctcatcggttacgccatcatgggttccattctgtactgcatcatccaggcctgtggtgagatggccctcgtgtacagcaacctgaccggtgggtacaatgcatacccgagtttcctggtggatgacgggttcgggtttgccgtcgcctgggtttactgtctgcaatggttatgtgtgtgtcccctggagctggtcacggcgtccatgaccatcaagtactggaccacgtccgtcaacccggacgtgttcgtcatcatcttctatgtcctggtcatcaccattaacattttcggcgctcgtggttacgcagaggcggaattcttcttcaactgctgcaaaatcctcatgatgaccgggttcttcattctcgggatcatcatcgatgtcggtggggccggaaacgacggctacattggtggcaagtactggcacgaacccggtgcgttcaacggtgtgcacgccattgacagattcaaaggtgtcgtcgccactttggtcaccgctgccttcgcgtttggtgggtccgaattcattgccatcaccactgccgaacagtccaacccaagaaaggccattccaggtgccgccaagcagatgatctacagaatcctgttcctgttcctggccaccatcatcattgtgggtttcctcgtgccatacaactccgaccaactgttgggttccagcggtggcggtaccaaggcctccccatacgttattgccatcgcatcccacggtgttcgtgtggccccacatttcgtcaacgccgttatcctactgtcggtcctatccatggccaactcctctttctactccagtgcccgtttgttcctaactttatccgagcaaggttacgcccccaagatcttttcctacattgacagagccggcagacctttgattgccatgtgcgtctccgcattgtttgccgtcattgccttctgtgctgcatcccccaaggaggaccaagtgttcacttggttgttggccatttccggtctatcccaacttttcacgtggaccgccatttgtctttctcatatcagattcagaagagccatgaaagtccaaggcagatcccttggtgaattgggtttcaaatctcaaaccggtgtttggggctctatctactcctgtatcatgatgatcctgattcttattggccaattctgggtcgccatcgcccccattggcgaaggtaagctggacgctcaagccttcttcgagaactacctggccatgccgatcctgattgtactgtacgtgggttacaaaatgtggaacaaggattggaaactgttcattagagccgataagatcgatttgacctctcacagacaaatcttcgacgaagaattaatcaagcaagaagatgacgaatacagagaacgtttgagaaccggcccttattggagaagggtcttggccttctggtgttga

SEQ ID NO: 3921 - protein, 633 aa, Saccharomyces bayanus
MSSSTSPYELKDLKNSSTEVHAAEQENEIEYFETDSNDRPSQQPHLDYEQHNTSAVRRFLDSFKRADQDQEQEAEVAQMNDLTSAISPSSRQAHELEKDETTDKIAPHTGHKSDSLKKTIQPRHVLMIALGTGIGTGLLVGNGTALVHAGPAGLLIGYAIMGSILYCIIQACGEMALVYSNLTGGYNAYPSFLVDDGFGFAVAWVYCLQWLCVCPLELVTASMTIKYWTTSVNPDVFVIIFYVLVITINIFGARGYAEAEFFFNCCKILMMTGFFILGIIIDVGGAGNDGYIGGKYWHEPGAFNGVHAIDRFKGVVATLVTAAFAFGGSEFIAITTAEQSNPRKAIPGAAKQMIYRILFLFLATIIIVGFLVPYNSDQLLGSSGGGTKASPYVIAIASHGVRVAPHFVNAVILLSVLSMANSSFYSSARLFLTLSEQGYAPKIFSYIDRAGRPLIAMCVSALFAVIAFCAASPKEDQVFTWLLAISGLSQLFTWTAICLSHIRFRRAMKVQGRSLGELGFKSQTGVWGSIYSCIMMILILIGQFWVAIAPIGEGKLDAQAFFENYLAMPILIVLYVGYKMWNKDWKLFIRADKIDLTSHRQIFDEELIKQEDDEYRERLRTGPYWRRVLAFWC

SEQ ID NO: 3922 - DNA, 1902 bp, Saccharomyces cerevisiae
  CDS (1)..(1902)
atgtcgtcgtcgaagtctctatacgaactgaaagacttgaaaaatagctccacagaaatacatgccacggggcaggataatgaaattgaatatttcgaaacaggctccaatgaccgtccatcctcacaacctcatttaggttacgaacagcataacacttctgccgtgcgtaggtttttcgactcctttaaaagagcggatcagggtccacaggatgaagtagaagcaacacaaatgaacgatcttacgtcggctatctcaccttcttctagacaggctcaagaactagaaaaaaatgaaagttcggacaacataggcgctaatacaggtcataagtcggactcgctgaagaaaaccattcagcctagacatgttctgatgattgcgttgggtacgggtatcggtactgggttattggtcggtaacggtaccgcgttggttcatgcgggtccagctggactacttattggttacgctattatgggttctatcttgtactgtattattcaagcatgtggtgaaatggcgctagtgtatagtaacttgactggtggctacaatgcataccccagtttccttgtggatgatggttttgggtttgcagtcgcttgggtttattgtttgcaatggctgtgtgtgtgtcctctggaattggtgaccgcatccatgactatcaaatattggacgacatctgtgaacccggatgtgttcgtcattattttctatgttttggtgattactattaatattttcggtgctcgtggttatgcagaagctgagttcttcttcaactgttgcaaaattttgatgatgactgggttcttcattcttggtattatcatcgatgttggtggcgctggtaatgatggttttattggtggtaaatactggcacgatccgggcgctttcaatggtaaacatgccattgacagatttaaaggtgttgctgcaacattagtgactgctgcttttgcctttggtggttcagagtttattgccatcaccactgcagaacaatctaatccaagaaaggccattccaggtgcggccaaacaaatgatctacagaatcttattcctattcttggctaccattattctactgggtttcttggtgccatacaattccgatcaattattgggttctaccggtggtggtactaaagcctcgccatatgtcattgctgttgcatcccacggtgtccgtgtcgtcccacacttcattaacgccgttattctactttccgtgctgtccatggctaactcctccttctactccagtgctcgtttatttttaactctatccgagcaaggttacgctcctaaggttttctcctacatcgacagagccggtagaccattgattgccatgggtgtttctgcattgtttgccgttattgccttctgtgctgcatctcccaaggaagaacaagttttcacttggttattggccatttctggtttgtctcagcttttcacatggactgccatttgtttatcccatcttagatttagaagagccatgaaagtccaagggagatctcttggagaattgggtttcaaatctcaaactggtgtttggggatctgcctacgcttgcattatgatgattttaattcttattgcccaattttgggtcgctatcgcccccattggtgaaggtaagctggatgcacaagcctttttcgaaaactacttggctatgccaatcttgattgcactttatgtcggctacaaggtctggcacaaggattggaaactgttcatcagggcagacaagatcgacctagattctcatagacaaatctttgatgaagaattaatcaagcaagaagacgaagaatatagggaacgtttgaggaacggaccttattggaaaagggtcgttgccttctggtgttaa

SEQ ID NO: 3923 - protein, 633 aa, Saccharomyces cerevisiae
MSSSKSLYELKDLKNSSTEIHATGQDNEIEYFETGSNDRPSSQPHLGYEQHNTSAVRRFFDSFKRADQGPQDEVEATQMNDLTSAISPSSRQAQELEKNESSDNIGANTGHKSDSLKKTIQPRHVLMIALGTGIGTGLLVGNGTALVHAGPAGLLIGYAIMGSILYCIIQACGEMALVYSNLTGGYNAYPSFLVDDGFGFAVAWVYCLQWLCVCPLELVTASMTIKYWTTSVNPDVFVIIFYVLVITINIFGARGYAEAEFFFNCCKILMMTGFFILGIIIDVGGAGNDGFIGGKYWHDPGAFNGKHAIDRFKGVAATLVTAAFAFGGSEFIAITTAEQSNPRKAIPGAAKQMIYRILFLFLATIILLGFLVPYNSDQLLGSTGGGTKASPYVIAVASHGVRVVPHFINAVILLSVLSMANSSFYSSARLFLTLSEQGYAPKVFSYIDRAGRPLIAMGVSALFAVIAFCAASPKEEQVFTWLLAISGLSQLFTWTAICLSHLRFRRAMKVQGRSLGELGFKSQTGVWGSAYACIMMILILIAQFWVAIAPIGEGKLDAQAFFENYLAMPILIALYVGYKVWHKDWKLFIRADKIDLDSHRQIFDEELIKQEDEEYRERLRNGPYWKRVVAFWC

SEQ ID NO: 3924 - DNA, 1830 bp, Saccharomyces cerevisiae
  CDS (1)..(1830)
atgctatcttcagaagattttggatcttctgggaaaaaggaaacttctcctgattcgatatcgatacgttcctttagtgccgggaataatttccaatcatcatcaagtgagaaaacttattctaagcaaaaatccgggagtgacaaacttatacatagatttgcggattcattcaaaagagccgagggtagcactacaagaactaagcaaataaatgaaaatacgtctgatttagaggatggcgttgagtctatcacgtcggattccaagttgaaaaagtccatgaagtcgcgccatgttgtcatgatgtctttagggacaggtattgggactggtcttttggtagctaatgcaaaaggtctacattacggtggtcctgctgcgctaataattggttacatcttggtttctttcgagacgtacttcatgatccaagctgcaggtgagatggcggtaacctatccgactttaccagcaaatttcaacgcatactcctccatattcatttccaaatcatttggattcgccacagtatggctttactgtttccaatggctaacggttttgcctttagagttaataaccgcgtctatgactattcaatttgggaatgataaaataaatccggacatttatattcttattttctatgttttcttagtattcattcatttcttcggtgtaaaagcctatggtgaaacggaattcatcttcaattgctgtaaaattttaatgattgcaggtttcattattctttctattgttatcaactgtggtggggccggaaatgacggttatatcggggccacttattggcataatccaggtgcttttgcaggtgacacatcgattggtaggttcaaaaacgtttgctatattttagttactgcttacttctcctttggtggtatggaattatttgcactaagtgttcaggaacagtctaaccctagaaaatctactccggtggcagccaagagaagcatttatcgtatcgttgtgatttatcttttgactatgatcctcattggattcaatgttccatataatgatgaccaactaatgggcgcaggcggatccgctacacatgcatctccctatgtcttagccgcttctattcacggtgtgaaaattgttccacatattatcaacgctgttattttgatttctgtggtttcagtggcaaattcctctttgtatgctggtccaagactgatttgctctttggcccaacaaggctacgcacccaagtttttagattacgttgacagagagggcaggcccttgagagctcttattgtgtgttgcgttttcggcgtcattgcttttgttgcagcttcatcaaaggaagagatcgtgtttacatggttagcagctatcgcaggcttgagtgaattattcacatggacttccataatgttgtcccatctgcgattcagacaagcaatgaaagtacagggaaggtctctagacgagttgggatacaaggccacaacagggatttggggttccatatacggtgtcttttttaatattttagtctttgttgcccaattttgggtagcattggcccccttaggtaatgggggcaaatgcgatgcggaatccttctttcaaaattatttagcttttccaatatggttggccttttacttcggatatatggtttacaaccgagattttacgctattaaatcccctcgacaagattgaccttgacttccacagacgcatttatgatccagagctaatgagacaagaggacgaagaaaataaagaaaaactaaggaatatgtctttgatgagaaaagcttatcatttctggtgttaa

SEQ ID NO: 3925 - protein, 609 aa, Saccharomyces cerevisiae
MLSSEDFGSSGKKETSPDSISIRSFSAGNNFQSSSSEKTYSKQKSGSDKLIHRFADSFKRAEGSTTRTKQINENTSDLEDGVESITSDSKLKKSMKSRHVVMMSLGTGIGTGLLVANAKGLHYGGPAALIIGYILVSFETYFMIQAAGEMAVTYPTLPANFNAYSSIFISKSFGFATVWLYCFQWLTVLPLELITASMTIQFGNDKINPDIYILIFYVFLVFIHFFGVKAYGETEFIFNCCKILMIAGFIILSIVINCGGAGNDGYIGATYWHNPGAFAGDTSIGRFKNVCYILVTAYFSFGGMELFALSVQEQSNPRKSTPVAAKRSIYRIVVIYLLTMILIGFNVPYNDDQLMGAGGSATHASPYVLAASIHGVKIVPHIINAVILISVVSVANSSLYAGPRLICSLAQQGYAPKFLDYVDREGRPLRALIVCCVFGVIAFVAASSKEEIVFTWLAAIAGLSELFTWTSIMLSHLRFRQAMKVQGRSLDELGYKATTGIWGSIYGVFFNILVFVAQFWVALAPLGNGGKCDAESFFQNYLAFPIWLAFYFGYMVYNRDFTLLNPLDKIDLDFHRRIYDPELMRQEDEENKEKLRNMSLMRKAYHFWC

SEQ ID NO: 3926 - DNA, 1779 bp, Saccharomyces cerevisiae
  CDS (1)..(1779)
atgaccgaagactttatttcttctgtcaagcgttcaaatgaggagctgaaggagcgaaaatctaactttggatttgtagaatacaaatccaagcaattaacatcatcctcatcacacaattcaaactcatcgcatcacgatgatgacaaccaacacggcaagaggaatattttccagcgatgtgttgattctttcaagtctcctctggacggctcgttcgacacaagtaatttgaagaggactctgaaaccaaggcacttaatcatgattgccattgggggcagtataggtactggtttgtttgtcggtagtggtaaggcaatcgccgaaggtggtcctcttggtgtcgtcattggttgggctattgcaggctctcaaatcatcgggacgattcatgggctaggtgaaatcacggtgcggtttcccgttgtcggggcctttgccaattacggcacaaggtttttggatccaagtataagttttgttgtttcgaccatatacgtgctacagtggttttttgtattacccttagaaatcattgcggcggcaatgaccgtacagtactggaactcgtctattgaccccgtaatttgggtagccatcttttatgctgttattgtttccataaatttgtttggtgtacgaggttttggggaagcggaatttgcattttccaccataaaagcaataacagtttgcggattcattatattgtgcgttgtcctcatttgcggtggaggtcccgaccacgagttcattggcgccaaatactggcacgaccctggttgtttggccaatgggttcccgggcgttctatctgttcttgttgttgcttcgtattctctcggtggtatagaaatgacgtgcctggcatcaggtgaaacggaccccaaaggcttaccaagtgctatcaagcaagtgttttggaggatcttatttttctttttgatatcactgaccctggtaggattcctggttccatatacaaaccaaaacttactgggtggttcatctgtggacaactcaccttttgtcattgccataaaattgcatcacattaaagccttgccctccatcgtcaatgcggtcatccttatcagtgttttgagtgtaggtaactcctgcatcttcgcttcaagtagaacgttgtgttcgatggcccaccaaggccttattccatggtggtttggttatatcgaccgtgctggtaggccgctggttggcattatggcaaattcactatttggattactagcatttctggtcaaatctggctcgatgtctgaagttttcaattggttaatggccattgccggcctggccacgtgcattgtctggttgagcatcaacctgtcacatatcagatttagactggcgatgaaggctcaagggaagtctctggatgaattagaatttgttagtgctgtcgggatttggggatcagcgtattccgctttaatcaactgtctaatcttgatagctcaattctattgttcactatggcccattggtggctggaccagcggcaaagaaagggctaaaatattttttcaaaattatctgtgtgccttaatcatgttatttatattcatcgtccacaaaatttattacaagtgtcaaacaggcaaatggtggggggttaaggcgttaaaggacatagatttggaaaccgatcgtaaagatatcgacatcgaaatagtcaagcaagaaattgccgaaaagaaaatgtacctagattcccgtccatggtacgtgagacagttccatttctggtgttaa

SEQ ID NO: 3927 - protein, 592 aa, Saccharomyces cerevisiae
MTEDFISSVKRSNEELKERKSNFGFVEYKSKQLTSSSSHNSNSSHHDDDNQHGKRNIFQRCVDSFKSPLDGSFDTSNLKRTLKPRHLIMIAIGGSIGTGLFVGSGKAIAEGGPLGVVIGWAIAGSQIIGTIHGLGEITVRFPVVGAFANYGTRFLDPSISFVVSTIYVLQWFFVLPLEIIAAAMTVQYWNSSIDPVIWVAIFYAVIVSINLFGVRGFGEAEFAFSTIKAITVCGFIILCVVLICGGGPDHEFIGAKYWHDPGCLANGFPGVLSVLVVASYSLGGIEMTCLASGETDPKGLPSAIKQVFWRILFFFLISLTLVGFLVPYTNQNLLGGSSVDNSPFVIAIKLHHIKALPSIVNAVILISVLSVGNSCIFASSRTLCSMAHQGLIPWWFGYIDRAGRPLVGIMANSLFGLLAFLVKSGSMSEVFNWLMAIAGLATCIVWLSINLSHIRFRLAMKAQGKSLDELEFVSAVGIWGSAYSALINCLILIAQFYCSLWPIGGWTSGKERAKIFFQNYLCALIMLFIFIVHKIYYKCQTGKWWGVKALKDIDLETDRKDIDIEIVKQEIAEKKMYLDSRPWYVRQFHFWC

SEQ ID NO: 3928 - DNA, 1860 bp, Saccharomyces cerevisiae
  CDS (1)..(1860)
atggacgatagtgtcagtttcattgccaaagaggccagtccagcacaatattcgcacagtttgcatgaaagaacacacagtgaaaaacaaaagagagactttacaataacagaaaaacaagatgaggtatctggacaaacagcggagcctcgaaggacggacagcaaatccatattacagaggaaatgcaaagaattcttcgactcttttaaaaggcagctgccaccagaccgtaattccgaactagagtcccaagaaaaaaacaacctgacaaagtcgatcaaatctcgtcacttagtcatgatcagtctcggtaccggtataggtactggtttactggtcggtaatggtcaggtgctgggaacagctggtcctgccgggttagtccttggttacggaatagcatcgatcatgctttactgtatcatccaagcggcaggcgagttaggtctctgttatgcaggactaaccggcaattacaccagatatccttctattttagtcgacccttcgttgggttttgcagtttctgtggtttacaccattcaatggctaactgttctgcccttacaattggtcactgcggcaatgacagttaagtactggacgagtgtaaatgcagacatctttgttgccgtggttttcgtttttgtaattatcattaatctatttgggtccagaggctatgctgaagccgagttcattttcaattcctgtaagatattgatggtaatcggattcgtcattctggcgattatcatcaattgtgggggtgcaggtgacagaagatacatcggtgctgagtactggcacaatcctggtccatttgcccacggtttcaaaggtgtatgtacggttttctgttatgctgcattcagctacggtggaattgaagttctacttctatctgccgctgagcaggaaaacccaacaaaatctattcccaatgcctgcaaaaaagtggtataccgtattctgctgatttacatgctcaccaccattttggtttgctttcttgttccatacaacagtgacgaattattagggtctagtgactcctctggatcccatgcctccccatttgtcattgctgttgcatcacatggtgtcaaagttgtgcctcactttataaatgctgttattttgatttctgtcatttctgttgcaaactcttcgttatattctgggccaagattgttattatcattggcagaacaaggcgtcttacctaaatgcttagcatatgttgatagaaacggcaggcctttactttgtttttttgtttcccttgtctttggatgcattgggtttgtagccactagtgacgctgaagaacaggttttcacctggttattggcaatttctagtctttcgcaattatttatctggatgtcaatgtccttgtcacatataagatttagagatgccatggcaaagcaaggtcgttcgatgaacgaagttggatacaaagcacaaactggctattggggttcatggcttgcagttttaattgcaatcttcttccttgtgtgccagttctgggtagccatcgcacctgttaatgaacatggaaaacttaacgtcaaagtgtttttccaaaattatttggcaatgcccatcgttttgtttgcctattttggtcacaagatatacttcaaatcatggagcttttggattccagccgaaaaaattgatttggactcacatagaaacatatttgtgtctccatcgcttacagagatcgacaaagttgacgataacgatgatcttaaagagtatgaaaattcagaatcgtcggaaaatccaaacagttcgcgttcaagaaagttttttaagaggatgaccaatttctggtgctaa

SEQ ID NO: 3929 - protein, 619 aa, Saccharomyces cerevisiae
MDDSVSFIAKEASPAQYSHSLHERTHSEKQKRDFTITEKQDEVSGQTAEPRRTDSKSILQRKCKEFFDSFKRQLPPDRNSELESQEKNNLTKSIKSRHLVMISLGTGIGTGLLVGNGQVLGTAGPAGLVLGYGIASIMLYCIIQAAGELGLCYAGLTGNYTRYPSILVDPSLGFAVSVVYTIQWLTVLPLQLVTAAMTVKYWTSVNADIFVAVVFVFVIIINLFGSRGYAEAEFIFNSCKILMVIGFVILAIIINCGGAGDRRYIGAEYWHNPGPFAHGFKGVCTVFCYAAFSYGGIEVLLLSAAEQENPTKSIPNACKKVVYRILLIYMLTTILVCFLVPYNSDELLGSSDSSGSHASPFVIAVASHGVKVVPHFINAVILISVISVANSSLYSGPRLLLSLAEQGVLPKCLAYVDRNGRPLLCFFVSLVFGCIGFVATSDAEEQVFTWLLAISSLSQLFIWMSMSLSHIRFRDAMAKQGRSMNEVGYKAQTGYWGSWLAVLIAIFFLVCQFWVAIAPVNEHGKLNVKVFFQNYLAMPIVLFAYFGHKIYFKSWSFWIPAEKIDLDSHRNIFVSPSLTEIDKVDDNDDLKEYENSESSENPNSSRSRKFFKRMTNFWC

SEQ ID NO: 3930 - DNA, 1746 bp, Schizosaccharomyces pombe
  CDS (1)..(1746)
atgtcacatagcgattacaatttcgatattgagcaaaacgcttttgaaaaggaagcaccgaaggtgtccatcgaaagaaaaggagatgtcgttgaggaagaggtaatagctaccggcgaagtcgagaattatgctgaaccaaagagtagaaactttttgcagagattttttgacgactttaagcctgctttaacaactcgtggtgacggtgtagcactgaaacgaaaattgacatccagacacatgcagatgatttcggttggaggagccattggtagtggtctgtatgttggttcaggcagtgcattcgcagatggcggcccagcctcagtaattatcaattatatcttaattggaattatgatgatttttgttatttacgctctcggcgaattagcaattgcttatccagttgctggcagttttaatacttatgcaacgcgcttcattgatcctgcctggggatttgctgttagctggaattactttcttaattattttgtcacgtgtccattggaactaacaacgtgtgccattacttttaaattttggacagaaattaatagtgcagcgtggattagcatttttttagcggttgttattgtcatcaatctttttggagttcgtgcatacggagaagtggaatttatattgagtactattaaagtaattgctaccgttggtttcattattttagccatcattattaactgtggaggtgtaccaaccgaccatcgaggatatattggtggcagtattatcaaacaaaaaccatttcgacatggattcaaaggattttgttcagtttttaccactgctgctttctccttttctggaactgaaattattggactggcagcagccgaagttggtaatccaaggaaatccgtacccagtgctgttaaacaagtgttttggcgtattgctatcttttatgttgtctctttaatattgattggattgttggtcagtccggatgatcctagattgatgggcaacggcgatgtcagcgtttcaccttttgttctagctattcaagaagctaatattaaaggtcttccttctgtttttaacgctgtcattattatttcggtagtttcggtaaccaattctactacgtacactgcagctcgtacccttcaaggtatggcaactctcaagcaagcacccaagtttttttcttatactgatcgagttggccgtcctttaatagccatggttgtggttctcttatttggcttctttgcatacattaatgaagccgacaaaaacggaagcgatatcagcgacacagtgttcgactggttactagcaatctcaggattgtcaagcttttttacttggggaagtatatgtttatctcatattatgttccgtttagcatttaagaagcaaggtcattccttaaaggagttgggatttgtgtctcccatgggaatctggggttcagtcattggattgggtttcaacatattatgtttgatggctgagttttatgtatctctgttcctcataggtggtagtccgaatgctaatgatttctttcaaggatatctagctgcctgcattgctttagctttttttattggttacaagatttacgacagatcgcatattccctctttggataaactagatatcgatactggacttaaaacttatgacaaccaagatgaagaaaaagaagaatattcttccaagggtcctctaaacattttgaaaaaagcatggaatgccgtttgctga

SEQ ID NO: 3931 - protein, 581 aa, Schizosaccharomyces pombe
MSHSDYNFDIEQNAFEKEAPKVSIERKGDVVEEEVIATGEVENYAEPKSRNFLQRFFDDFKPALTTRGDGVALKRKLTSRHMQMISVGGAIGSGLYVGSGSAFADGGPASVIINYILIGIMMIFVIYALGELAIAYPVAGSFNTYATRFIDPAWGFAVSWNYFLNYFVTCPLELTTCAITFKFWTEINSAAWISIFLAVVIVINLFGVRAYGEVEFILSTIKVIATVGFIILAIIINCGGVPTDHRGYIGGSIIKQKPFRHGFKGFCSVFTTAAFSFSGTEIIGLAAAEVGNPRKSVPSAVKQVFWRIAIFYVVSLILIGLLVSPDDPRLMGNGDVSVSPFVLAIQEANIKGLPSVFNAVIIISVVSVTNSTTYTAARTLQGMATLKQAPKFFSYTDRVGRPLIAMVVVLLFGFFAYINEADKNGSDISDTVFDWLLAISGLSSFFTWGSICLSHIMFRLAFKKQGHSLKELGFVSPMGIWGSVIGLGFNILCLMAEFYVSLFLIGGSPNANDFFQGYLAACIALAFFIGYKIYDRSHIPSLDKLDIDTGLKTYDNQDEEKEEYSSKGPLNILKKAWNAVC

SEQ ID NO: 3932 - DNA, 1758 bp, Schizosaccharomyces pombe
  CDS (1)..(1758)
atgaatgcttatgttagggattctgaatccgtatattcagaatcgtatcctcccgaaaacttcataagtaatgaacccgagaaatcaaaagataaagacaatttcaacggcgaagaagtcatttcttatgtcggtgaggtcgaaacagtccctgccaaagaagagaatgtatttcgacgattcattaatggatttaaaattgaaaaaaaccaacaagattctgccggacaaggactaaagcgtcggcttaagagtcgtcatattcaaatgatcggtattggtggagctattggtaccggtgtttgggtgggaagctctaaatctctttatagggggggagcagcgtcagttttaattgactactgtattgttggaactatggttttttgtactgtttatgctttaggagaattagctgttgcctttcctacgcggggaagttttgttacacatgctacgcgattcatcgatgaatcatggggctttgcacttagttggaattatgtattctcgttcattgttacgattccattagagttgacgacaggaacaatgatgatcaaatattggaccaatctaaacagtggtatatgggtgacagttttcatcgtgttcctattttttattaatatctttggagtaaaaggatatggtgaaatggagtttatcatgtctactatcaaagtggttgcaatgtgtggttttatcattcttggtatcattattgattgcggtggtgtaccaactgatcatcgaggctatatgggaacacatattttccgcgaaaatgcttttcgccacaaatttaaaggattttgcgctgtatttaccagtgctgcattttctttttccggtactgaatatgttggtgtcgcagcagctgaaacagagaaccccgcgaaggcctttccggttgcagtaagacaaacgctattcagaatagcaatattctacatactttcacttttcattgttagtttactcattagtggtgctgaccctcggttaacttcataccatggagttgatgcaagtccatttgtgctagctattaaagatgctaacatcaaagcgttaccttcaattctgaatgccattattttgatctccgtaatctcttctgctaatgctcagttgtacgctggaagtcgcgcaattcattccttagggtgtaatggctttgctcctaagtgttttacactggttgatcgtgaaggtcgacctctcgttgctcttcttattttgttcttgtttatgtttttaggttaccttgtcgaaacaggacaatatgacactgtatttgactggatgctgtcgatttctggtttgggtacattattttgctggggcagtatatgtctagcacatattcggtatagagccgctatgaaacatcaaaacaggagcctcaaagaggttggatttgtctctccatttaatgtttatgcttcctattatgcttttatactagtttgcttagtgttggctgcagaattttatgtctccattttccctgttggcggtaaaccagatgccagtgcattttttgaaaactatttatctgctcctgtaattctagttttttttatatgccacaagctttattacaaaaccaaacgaattactctttcaaatatggatttggaaactgattttgcatacaaaactccagtggaagaagaagaagaagaagagaagagtgctggttccctaagtatcaaacaaagaatgaaaaagctatctgatatgatgtgctaa

SEQ ID NO: 3933 - protein, 585 aa, Schizosaccharomyces pombe
MNAYVRDSESVYSESYPPENFISNEPEKSKDKDNFNGEEVISYVGEVETVPAKEENVFRRFINGFKIEKNQQDSAGQGLKRRLKSRHIQMIGIGGAIGTGVWVGSSKSLYRGGAASVLIDYCIVGTMVFCTVYALGELAVAFPTRGSFVTHATRFIDESWGFALSWNYVFSFIVTIPLELTTGTMMIKYWTNLNSGIWVTVFIVFLFFINIFGVKGYGEMEFIMSTIKVVAMCGFIILGIIIDCGGVPTDHRGYMGTHIFRENAFRHKFKGFCAVFTSAAFSFSGTEYVGVAAAETENPAKAFPVAVRQTLFRIAIFYILSLFIVSLLISGADPRLTSYHGVDASPFVLAIKDANIKALPSILNAIILISVISSANAQLYAGSRAIHSLGCNGFAPKCFTLVDREGRPLVALLILFLFMFLGYLVETGQYDTVFDWMLSISGLGTLFCWGSICLAHIRYRAAMKHQNRSLKEVGFVSPFNVYASYYAFILVCLVLAAEFYVSIFPVGGKPDASAFFENYLSAPVILVFFICHKLYYKTKRITLSNMDLETDFAYKTPVEEEEEEEKSAGSLSIKQRMKKLSDMMC

SEQ ID NO: 3934 - DNA, 1743 bp, Schizosaccharomyces pombe
  CDS (1)..(1743)
atggaaccagaatatgtctcttttagcgacaaggacactaaatctatcctaaatgaaagcaaatcttctttgaaggatgtcaaaccttctttggaggaaaagagttacattaccccgggattagttgacgatgtggagcctaagggtaaaaacttcgtagtacgcttttttgatgactttaagcctgcaaaggcaacgggagaagatggcacggcgcttaagcgtagtctgaaaagccggcatatgcaaatgatatctattggaggtgcaattggtacaggtctatatgtcggttcaggtagttcgcttgcagatggcggacccgcttcagtgatcattaattacagcttaattggaattatgatgttctttattgtttatgcgcttggtgaaatggctgttgcttatccggtcgctggtggattcaatacctatgctacccgtttcattgatccagcttggggatttgcggtaagttggaactacttcatcaactatttcgttacttttccacttgaattaacaacttgcgctatcacatttcggtactggacggatattaatagcgcagcttggatctctatttttctggttgtcattattatagtcaatctttttggcgttcgcgcatatggagaagtggagtttattttaagtactgttaaagtggtcgctacctttggattcatcattttggccatcatcatcaattgcggtggtgttccaactgatcaccggggttacattggcggaagtattataaaacataagccgtttcgacatgggttcaaaggattttgttctgtctttactactgcggctttctccttttctggtactgaagtcattggtttagcggcggctgaagttgacaatcctcagaaagcgcttcctcatgccgttaagcaagttttttggcgtattgctatattttatgttgtctccttgatattgatcggtttgcttattagccccgatgatcctaatttgatgggaaatggctctaccagtgtgtcacctttcgtacttgctattaaagaagcaaacatcaaaggcctaccttccgtttttaacgctgttattattatttccgtcgtttctgtgacaaattccagcacatatacagccggtcgtaccctccatggtatggcgaatttaaagcaggcaccctccttctttaaatataccgatcgtcttggtcgtcctttacttgccatgatcgttgttctgttatttggattctttgcttatatcaacgaagctgataaaaatggtaacgatgttagtgatacggtattcaattggttgcttgctctatctggtctgtcaaacttttttacctggggaagtatatgtctttgtcatatcatatttcgcttggcgtttaagaaacaaggacattccctaaaagaattgggatttgtatctcctatgggtatttggggatcttgcattggattatttttcaatattttatgccttatggcacaattttatgtctccttatttccaatcggtggaaaaccaaatgcaaatgattttttccaggggtatttggcggcacccgttacactcgctttttttatcggttataaaatatatgatagatcgcacatcccttctttggataaactagacattactactggtcttaaaacatatgagaatctcgatgaagaagaagatgagcccaccactgcttctaagaggattttcaagaaaatcagttcggttttctgttaa

SEQ ID NO: 3935 - protein, 580 aa, Schizosaccharomyces pombe
MEPEYVSFSDKDTKSILNESKSSLKDVKPSLEEKSYITPGLVDDVEPKGKNFVVRFFDDFKPAKATGEDGTALKRSLKSRHMQMISIGGAIGTGLYVGSGSSLADGGPASVIINYSLIGIMMFFIVYALGEMAVAYPVAGGFNTYATRFIDPAWGFAVSWNYFINYFVTFPLELTTCAITFRYWTDINSAAWISIFLVVIIIVNLFGVRAYGEVEFILSTVKVVATFGFIILAIIINCGGVPTDHRGYIGGSIIKHKPFRHGFKGFCSVFTTAAFSFSGTEVIGLAAAEVDNPQKALPHAVKQVFWRIAIFYVVSLILIGLLISPDDPNLMGNGSTSVSPFVLAIKEANIKGLPSVFNAVIIISVVSVTNSSTYTAGRTLHGMANLKQAPSFFKYTDRLGRPLLAMIVVLLFGFFAYINEADKNGNDVSDTVFNWLLALSGLSNFFTWGSICLCHIIFRLAFKKQGHSLKELGFVSPMGIWGSCIGLFFNILCLMAQFYVSLFPIGGKPNANDFFQGYLAAPVTLAFFIGYKIYDRSHIPSLDKLDITTGLKTYENLDEEEDEPTTASKRIFKKISSVFC

SEQ ID NO: 3936 - DNA, 1752 bp, Schizosaccharomyces pombe
  CDS (1)..(1752)
atgtcgtcgccagatcgctctattgacattgaccttgaaaaatatccttcaacggctaccaagtccgtctacggccaatcgaaggatgataaaaatgttttcgacattcatcccaccgaatccgaagtcatccccggtgaagtcgagtatgctgatactccttcccatcaaaatttcttgcaaaagttttttagcgacttcaaacccgttaaagccgaccgcgaggatggtgtcgcattaaagcgtcatctgaaaggtaggcatatgcaaatgattgccattggtggtgctattggtactggtttgtttgtgggttctggtagttcacttgctgatggtggaccggcttctgttattatcgattatactttgattggtattatgatgttctttactgtctatgctttaggtgaacttgctgtttcttatcctgtcgctggtggtttctataattacgcagttcgttttatcgatccagcctggggctttgccgttggttggaactatttcatgaattatttcgttacatttccactggagttaactacttgtgccatcactttccgctactggacagacattaatagttgtgcttggattacgattttcttggtatttgttatatgtatcaatcttttcggtgttagaggttatggtgaagttgaatttattctatctacgctcaaagttgttgccactactggttttattattttggctattattattaattgcggtggtgttcctactgatcctcgtggctacatcggtggtaaaattattaaaaacaaacctttccgtcatagctttaaaggtttttgttccgtgtttactactgccggtttctccttctcaggtactgaagttgttggtttagctgctgctgaagctgaagatcctcaaaagtctctccctcgtgctaccaaacaggtcttttggcgtattgctattttctacgtcgtatctttaattttaattggtctgcttgtttcaccagatgatcctcgtttgatgggtaatagcagcgatggtagtacctctcccttcgtgttggccattaaagaagcaaacatcagaggccttccttccgttttcaatgcagtaattatcatttctaccgtctctgttgcaaattcttgtactttcactgctagtcgtactcttcatgctatggccgctaaaggtgacgcacctcgcttctttgcatatactgatcgtcttggtcgtcccctcctcgctatggctgtttgtttgttgtttggattttttgcatatatcaatgccgccggtgatgttagtgacactgttttcgattggttattggctatttccggtatctcaaacttcttctcatggggcagtattaatctttgccatatcgtcttccgtcttgctatgaagaaacaaggccgttctttggatcaacttggatttgtatcacctatgggtatttggggttctgctattggattggctttcaacattttgtgtcttatggccgaattctatgtatctttgttccccatcggttcaaagccaaatgctaacgattttttccaaggatatcttgctgctccaattgtgattgctttctttattggctacaaaatttatgatagaagtcatattccctcattgagtaaacttgatttagacacgggacttcgtacctatcctccaaaagataaagaatctgagaaaattcgtgatgcgaagggtttctttaagtggatttggcaatctctttgctaa

SEQ ID NO: 3937 - protein, 583 aa, Schizosaccharomyces pombe
MSSPDRSIDIDLEKYPSTATKSVYGQSKDDKNVFDIHPTESEVIPGEVEYADTPSHQNFLQKFFSDFKPVKADREDGVALKRHLKGRHMQMIAIGGAIGTGLFVGSGSSLADGGPASVIIDYTLIGIMMFFTVYALGELAVSYPVAGGFYNYAVRFIDPAWGFAVGWNYFMNYFVTFPLELTTCAITFRYWTDINSCAWITIFLVFVICINLFGVRGYGEVEFILSTLKVVATTGFIILAIIINCGGVPTDPRGYIGGKIIKNKPFRHSFKGFCSVFTTAGFSFSGTEVVGLAAAEAEDPQKSLPRATKQVFWRIAIFYVVSLILIGLLVSPDDPRLMGNSSDGSTSPFVLAIKEANIRGLPSVFNAVIIISTVSVANSCTFTASRTLHAMAAKGDAPRFFAYTDRLGRPLLAMAVCLLFGFFAYINAAGDVSDTVFDWLLAISGISNFFSWGSINLCHIVFRLAMKKQGRSLDQLGFVSPMGIWGSAIGLAFNILCLMAEFYVSLFPIGSKPNANDFFQGYLAAPIVIAFFIGYKIYDRSHIPSLSKLDLDTGLRTYPPKDKESEKIRDAKGFFKWIWQSLC

SEQ ID NO: 3938 - DNA, 25 bp, Artificial sequence
  primer
atgtcagatcctatagtaacgtctt

SEQ ID NO: 3939 - DNA, 25 bp, Artificial sequence
  primer
ctaacaccaaaatttgtagactctg

SEQ ID NO: 3940 - protein, 608 aa, Artificial sequence
  consensus sequence
  Variant (2)..(4): Xaa in position 2 to 4 is any amino acid
  Variant (6)..(13): Xaa in position 6 to 13 is any amino acid
  Variant (14)..(57): Xaa in position 14 to 57 is any or no amino acid
  Variant (60)..(64): Xaa in position 60 to 64 is any amino acid
  Variant (67)..(68): Xaa in position 67 to 68 is any amino acid
  Variant (70)..(72): Xaa in position 70 to 72 is any amino acid
  Variant (74)..(75): Xaa in position 74 to 75 is any amino acid
  Variant (81)..(81): Xaa in position 81 is any amino acid
  Variant (83)..(87): Xaa in position 83 to 87 is any amino acid
  Variant (89)..(91): Xaa in position 89 to 91 is any amino acid
  Variant (94)..(97): Xaa in position 94 to 97 is any amino acid
  Variant (99)..(99): Xaa in position 99 is any amino acid
  Variant (101)..(107): Xaa in position 101 to 107 is any amino acid
  Variant (109)..(112): Xaa in position 109 to 112 is any amino acid
  Variant (114)..(114): Xaa in position 114 is any amino acid
  Variant (117)..(124): Xaa in position 117 to 124 is any amino acid
  Variant (125)..(125): Xaa in position 125 is any or no amino acid
  Variant (127)..(127): Xaa in position 127 is any amino acid
  Variant (129)..(130): Xaa in position 129 to 130 is any amino acid
  Variant (132)..(140): Xaa in position 132 to 140 is any amino acid
  Variant (144)..(145): Xaa in position 144 to 145 is any amino acid
  Variant (147)..(151): Xaa in position 147 to 151 is any amino acid
  Variant (153)..(156): Xaa in position 153 to 156 is any amino acid
  Variant (161)..(161): Xaa in position 161 is any amino acid
  Variant (163)..(165): Xaa in position 163 to 165 is any amino acid
  Variant (167)..(169): Xaa in position 167 to 169 is any amino acid
  Variant (171)..(180): Xaa in position 171 to 180 is any amino acid
  Variant (181)..(181): Xaa in position 181 is any or no amino acid
  Variant (184)..(189): Xaa in position 184 to 189 is any amino acid
  Variant (191)..(192): Xaa in position 191 to 192 is any amino acid
  Variant (195)..(197): Xaa in position 195 to 197 is any amino acid
  Variant (198)..(198): Xaa in position 198 is any or no amino acid
  Variant (200)..(200): Xaa in position 200 is any amino acid
  Variant (202)..(202): Xaa in position 202 is any amino acid
  Variant (205)..(205): Xaa in position 205 is any amino acid
  Variant (207)..(209): Xaa in position 207 to 209 is any amino acid
  Variant (211)..(215): Xaa in position 211 to 215 is any amino acid
  Variant (218)..(218): Xaa in position 218 is any amino acid
  Variant (221)..(226): Xaa in position 221 to 226 is any amino acid
  Variant (229)..(233): Xaa in position 229 to 233 is any amino acid
  Variant (234)..(236): Xaa in position 234 to 236 is any or no amino acid
  Variant (239)..(245): Xaa in position 239 to 245 is any amino acid
  Variant (246)..(247): Xaa in position 246 to 247 is any or no amino acid
  Variant (249)..(251): Xaa in position 249 to 251 is any amino acid
  Variant (252)..(256): Xaa in position 252 to 256 is any or no amino acid
  Variant (259)..(266): Xaa in position 259 to 266 is any amino acid
  Variant (268)..(268): Xaa in position 268 is any amino acid
  Variant (270)..(272): Xaa in position 270 to 272 is any amino acid
  Variant (274)..(274): Xaa in position 274 is any amino acid
  Variant (276)..(278): Xaa in position 276 to 278 is any amino acid
  Variant (280)..(282): Xaa in position 280 to 282 is any amino acid
  Variant (284)..(285): Xaa in position 284 to 285 is any amino acid
  Variant (288)..(288): Xaa in position 288 is any amino acid
  Variant (290)..(291): Xaa in position 290 to 291 is any amino acid
  Variant (293)..(293): Xaa in position 293 is any amino acid
  Variant (295)..(295): Xaa in position 295 is any amino acid
  Variant (297)..(300): Xaa in position 297 to 300 is any amino acid
  Variant (303)..(305): Xaa in position 303 to 305 is any amino acid
  Variant (307)..(313): Xaa in position 307 to 313 is any amino acid
  Variant (315)..(316): Xaa in position 315 to 316 is any amino acid
  Variant (319)..(323): Xaa in position 319 to 323 is any amino acid
  Variant (325)..(325): Xaa in position 325 is any amino acid
  Variant (327)..(332): Xaa in position 327 to 332 is any amino acid
  Variant (333)..(335): Xaa in position 333 to 335 is any or no amino acid
  Variant (338)..(338): Xaa in position 338 is any amino acid
  Variant (340)..(340): Xaa in position 340 is any amino acid
  Variant (342)..(350): Xaa in position 342 to 350 is any amino acid
  Variant (352)..(354): Xaa in position 352 to 354 is any amino acid
  Variant (360)..(360): Xaa in position 360 is any amino acid
  Variant (363)..(363): Xaa in position 363 is any amino acid
  Variant (365)..(366): Xaa in position 365 to 366 is any amino acid
  Variant (369)..(370): Xaa in position 369 to 370 is any amino acid
  Variant (372)..(374): Xaa in position 372 to 374 is any amino acid
  Variant (376)..(379): Xaa in position 376 to 379 is any amino acid
  Variant (381)..(383): Xaa in position 381 to 383 is any amino acid
  Variant (385)..(385): Xaa in position 385 is any amino acid
  Variant (389)..(391): Xaa in position 389 to 391 is any amino acid
  Variant (393)..(393): Xaa in position 393 is any amino acid
  Variant (396)..(396): Xaa in position 396 is any amino acid
  Variant (400)..(401): Xaa in position 400 to 401 is any amino acid
  Variant (403)..(413): Xaa in position 403 to 413 is any amino acid
  Variant (415)..(423): Xaa in position 415 to 423 is any amino acid
  Variant (424)..(429): Xaa in position 424 to 429 is any or no amino acid
  Variant (431)..(431): Xaa in position 431 is any amino acid
  Variant (434)..(434): Xaa in position 434 is any amino acid
  Variant (437)..(437): Xaa in position 437 is any amino acid
  Variant (441)..(442): Xaa in position 441 to 442 is any amino acid
  Variant (444)..(444): Xaa in position 444 is any amino acid
  Variant (446)..(447): Xaa in position 446 to 447 is any amino acid
  Variant (449)..(450): Xaa in position 449 to 450 is any amino acid
  Variant (453)..(453): Xaa in position 453 is any amino acid
  Variant (457)..(457): Xaa in position 457 is any amino acid
  Variant (459)..(461): Xaa in position 459 to 461 is any amino acid
  Variant (464)..(464): Xaa in position 464 is any amino acid
  Variant (467)..(467): Xaa in position 467 is any amino acid
  Variant (469)..(469): Xaa in position 469 is any amino acid
  Variant (471)..(475): Xaa in position 471 to 475 is any amino acid
  Variant (477)..(478): Xaa in position 477 to 478 is any amino acid
  Variant (481)..(493): Xaa in position 481 to 493 is any amino acid
  Variant (496)..(496): Xaa in position 496 is any amino acid
  Variant (498)..(500): Xaa in position 498 to 500 is any amino acid
  Variant (502)..(503): Xaa in position 502 to 503 is any amino acid
  Variant (504)..(508): Xaa in position 504 to 508 is any or no amino acid
  Variant (510)..(512): Xaa in position 510 to 512 is any amino acid
  Variant (513)..(515): Xaa in position 513 to 515 is any or no amino acid
  Variant (518)..(519): Xaa in position 518 to 519 is any amino acid
  Variant (523)..(523): Xaa in position 523 is any amino acid
  Variant (525)..(531): Xaa in position 525 to 531 is any amino acid
  Variant (534)..(547): Xaa in position 534 to 547 is any amino acid
  Variant (548)..(553): Xaa in position 548 to 553 is any or no amino acid
  Variant (556)..(586): Xaa in position 556 to 586 is any amino acid
  Variant (587)..(607): Xaa in position 587 to 607 is any or no amino acid
FXXXFXXXXXXXXXXXXXXXXXXXXXXXXXXXXXXXXXXXXXXXXXXXXXXXXXXXXLKXXXXXRHXXMXXXGXXIGTGLXVXXXXXLXXXGPXXXXIXYXXXXXXXYXXXXAXGEXXXXXXXXXGXFXXYXXXXXXXXXGFAXXWXXXXXWXXXXPLELXTXXXTXXXWXXXXXXXXXXXIFXXXXXXIXXFGXXXXYXEXEFXFXXXKXXXXXGFXILXXXXXXGGXXXXXXXXIGXXXXXXXXXFXXXXXXXXFKXXXXXXXXAXFXXXGXEXXXLXXXEXXNPXKXXPXAXKXXXXRIXXXYXXXXXXXGXXVPXXXXXLXGXXXXXXXXXSPXVXAXXXXXXXXXPXXXNAVILXSVXSXXNSXXYXXXRXXXXLXXXGXAPKXXXYXDRXGRPXXAXXXXXXXXXXXFXXXXXXXXXXXXXXXFXWLXAIXGLSXXFXWXXIXXSHXRFRXAXXXQGXSLXEXGXXXXXGXXGSXXXXXXXXXXXXXQFXVXXXPXXXXXXXGXXXXXXFFXXYLAXPXXXXXXXGYXXXXXXXXXXXXXXXXXXXXDLXXXXXXXXXXXXXXXXXXXXXXXXXXXXXXXXXXXXXXXXXXXXXXXXXXXXC

SEQ ID NO: 3941 - protein, 60 aa, Artificial sequence
  protein pattern
  Variant (3)..(3): Xaa in position 3 is any amino acid
  Variant (5)..(5): Xaa in position 5 is Ile, Leu or Val
  Variant (7)..(7): Xaa in position 7 is Ala, Ile or Val
  Variant (8)..(11): Xaa in position 8 to 11 is any amino acid
  Variant (12)..(12): Xaa in position 12 is Ile or Val
  Variant (13)..(13): Xaa in position 13 is Lys or Arg
  Variant (14)..(14): Xaa in position 14 is Ala, Gly, Ile or Val
  Variant (15)..(15): Xaa in position 15 is Ala, Ile, Leu or Val
  Variant (17)..(17): Xaa in position 17 is any amino acid
  Variant (18)..(18): Xaa in position 18 is Phe, Ile, Leu or Val
  Variant (19)..(19): Xaa in position 19 is Phe, Ile or Val
  Variant (24)..(24): Xaa in position 24 is Ile or Leu
  Variant (25)..(25): Xaa in position 25 is Ile, Leu or Met
  Variant (26)..(26): Xaa in position 26 is Ala or Ser
  Variant (27)..(28): Xaa in position 27 to 28 is any amino acid
  Variant (30)..(30): Xaa in position 30 is Met or Val
  Variant (31)..(31): Xaa in position 31 is Ala, Gly, Ser or Thr
  Variant (34)..(34): Xaa in position 34 is Ala, Cys, Ser or Thr
  Variant (35)..(35): Xaa in position 35 is any amino acid
  Variant (36)..(36): Xaa in position 36 is Phe or Tyr
  Variant (37)..(37): Xaa in position 37 is any amino acid
  Variant (38)..(38): Xaa in position 38 is Ala, Gly or Ser
  Variant (39)..(39): Xaa in position 39 is Ala, Gly, Pro or Ser
  Variant (41)..(41): Xaa in position 41 is any amino acid
  Variant (42)..(42): Xaa in position 42 is Phe, Ile, Leu or Met
  Variant (43)..(43): Xaa in position 43 is any amino acid
  Variant (44)..(44): Xaa in position 44 is Ala, Gly, Ser or Thr
  Variant (45)..(45): Xaa in position 45 is Leu or Met
  Variant (46)..(46): Xaa in position 46 is Ala or Ser
  Variant (47)..(50): Xaa in position 47 to 50 is any amino acid
  Variant (51)..(51): Xaa in position 51 is Ala, Gly, Ile or Leu
  Variant (53)..(54): Xaa in position 53 to 54 is any amino acid
  Variant (55)..(55): Xaa in position 55 is Phe or Leu
  Variant (56)..(56): Xaa in position 56 is any amino acid
  Variant (58)..(58): Xaa in position 58 is any amino acid
SPXVXAXXXXXXXXXPXXXNAVIXXXXXSXXNSXXXXXXRXXXXXXXXXXXPXXXXYXDR

SEQ ID NO: 3942 - protein, 44 aa, Artificial sequence
  protein pattern
  Variant (2)..(3): Xaa in position 2 to 3 is any amino acid
  Variant (5)..(5): Xaa in position 5 is any amino acid
  Variant (7)..(7): Xaa in position 7 is Ile or Leu
  Variant (8)..(8): Xaa in position 8 is Ala or Ser
  Variant (9)..(9): Xaa in position 9 is Gly or Ser
  Variant (10)..(10): Xaa in position 10 is Ile or Leu
  Variant (11)..(11): Xaa in position 11 is Ala or Ser
  Variant (12)..(12): Xaa in position 12 is Glu, Asn, Gln, Ser or Thr
  Variant (13)..(13): Xaa in position 13 is any amino acid
  Variant (14)..(14): Xaa in position 14 is Phe or Ile
  Variant (15)..(15): Xaa in position 15 is any amino acid
  Variant (16)..(16): Xaa in position 16 is Trp or Tyr
  Variant (17)..(17): Xaa in position 17 is any amino acid
  Variant (18)..(18): Xaa in position 18 is Ala, Gly or Ser
  Variant (19)..(19): Xaa in position 19 is Ile or Met
  Variant (20)..(20): Xaa in position 20 is any amino acid
  Variant (21)..(21): Xaa in position 21 is Phe, Leu or Val
  Variant (22)..(22): Xaa in position 22 is Cys or Ser
  Variant (24)..(24): Xaa in position 24 is Phe, Ile, Leu or Val
  Variant (25)..(25): Xaa in position 25 is any amino acid
  Variant (26)..(26): Xaa in position 26 is Phe or Met
  Variant (28)..(28): Xaa in position 28 is any amino acid
  Variant (29)..(29): Xaa in position 29 is Ala or Cys
  Variant (30)..(30): Xaa in position 30 is Phe or Met
  Variant (31)..(35): Xaa in position 31 to 35 is any amino acid
  Variant (37)..(38): Xaa in position 37 to 38 is any amino acid
  Variant (39)..(39): Xaa in position 39 is Glu, Gln or Thr
  Variant (40)..(40): Xaa in position 40 is Ile, Leu or Val
  Variant (41)..(41): Xaa in position 41 is Glu or Gly
  Variant (42)..(42): Xaa in position 42 is Phe or Tyr
  Variant (43)..(43): Xaa in position 43 is any amino acid
  Variant (44)..(44): Xaa in position 44 is Ala or Ser
FXXLXAXXXXXXXXXXXXXXXXHXXXRXXXXXXXXSXXXXXXXX

SEQ ID NO: 3943 - protein, 61 aa, Artificial sequence
  protein pattern
  Variant (2)..(4): Xaa in position 2 to 4 is any amino acid
  Variant (5)..(5): Xaa in position 5 is Ile, Leu or Met
  Variant (6)..(7): Xaa in position 6 to 7 is any amino acid
  Variant (10)..(10): Xaa in position 10 is Ile, Leu, Met or Val
  Variant (11)..(11): Xaa in position 11 is any amino acid
  Variant (12)..(12): Xaa in position 12 is Phe, Leu or Met
  Variant (13)..(13): Xaa in position 13 is Ile or Met
  Variant (14)..(14): Xaa in position 14 is Ala, Cys, Gly, Ser or Thr
  Variant (15)..(15): Xaa in position 15 is Ile, Leu or Val
  Variant (17)..(17): Xaa in position 17 is any or no amino acid
  Variant (19)..(19): Xaa in position 19 is any amino acid
  Variant (20)..(20): Xaa in position 20 is any or no amino acid
  Variant (22)..(22): Xaa in position 22 is Ser or Thr
  Variant (24)..(24): Xaa in position 24 is Leu or Val
  Variant (25)..(25): Xaa in position 25 is any amino acid
  Variant (26)..(26): Xaa in position 26 is Phe or Val
  Variant (27)..(27): Xaa in position 27 is Ala or Gly
  Variant (28)..(28): Xaa in position 28 is Asn or Ser
  Variant (29)..(29): Xaa in position 29 is Ala, Gly or Ser
  Variant (30)..(30): Xaa in position 30 is any amino acid
  Variant (31)..(31): Xaa in position 31 is Ala, Gly, Ser, Thr or Val
  Variant (32)..(32): Xaa in position 32 is Phe, Ile or Leu
  Variant (33)..(34): Xaa in position 33 to 34 is any amino acid
  Variant (35)..(35): Xaa in position 35 is Ala or Gly
  Variant (37)..(37): Xaa in position 37 is Ala or Pro
  Variant (38)..(38): Xaa in position 38 is Ala, Gly or Leu
  Variant (39)..(39): Xaa in position 39 is Ala, Gly or Ser
  Variant (40)..(40): Xaa in position 40 is Ala, Leu or Val
  Variant (41)..(41): Xaa in position 41 is Ile, Leu or Val
  Variant (42)..(42): Xaa in position 42 is Ile or Leu
  Variant (43)..(43): Xaa in position 43 is Ala, Asp, Gly or Asn
  Variant (44)..(44): Xaa in position 44 is Trp or Tyr
  Variant (45)..(45): Xaa in position 45 is any amino acid
  Variant (46)..(46): Xaa in position 46 is Ile, Leu or Met
  Variant (47)..(47): Xaa in position 47 is any amino acid
  Variant (48)..(48): Xaa in position 48 is Gly or Ser
  Variant (49)..(54): Xaa in position 49 to 54 is any amino acid
  Variant (55)..(55): Xaa in position 55 is Ile, Met or Val
  Variant (56)..(56): Xaa in position 56 is any amino acid
  Variant (57)..(57): Xaa in position 57 is Ala, Gly or Ser
  Variant (58)..(58): Xaa in position 58 is any amino acid
  Variant (61)..(61): Xaa in position 61 is Ile, Leu or Met
LXXXXXXRHXXXXXXGXGXXGXGXXXXXXXXXXXXGXXXXXXXXXXXXXXXXXXXXXXGEX

SEQ ID NO: 3944 - protein, 39 aa, Artificial sequence
  protein pattern
  Variant (2)..(2): Xaa in position 2 is any or no amino acid
  Variant (4)..(4): Xaa in position 4 is Ala, Ser or Val
  Variant (5)..(5): Xaa in position 5 is any amino acid
  Variant (6)..(6): Xaa in position 6 is Ala or Gly
  Variant (8)..(8): Xaa in position 8 is Ala or Gly
  Variant (10)..(10): Xaa in position 10 is any amino acid
  Variant (13)..(13): Xaa in position 13 is Phe, Ile, Leu, Met or Val
  Variant (14)..(14): Xaa in position 14 is Phe, Leu or Met
  Variant (15)..(15): Xaa in position 15 is Asn or Ser
  Variant (16)..(17): Xaa in position 16 to 17 is any amino acid
  Variant (19)..(19): Xaa in position 19 is Ile or Val
  Variant (20)..(23): Xaa in position 20 to 23 is any amino acid
  Variant (26)..(26): Xaa in position 26 is any or no amino acid
  Variant (28)..(28): Xaa in position 28 is Ile or Leu
  Variant (29)..(30): Xaa in position 29 to 30 is any amino acid
  Variant (31)..(31): Xaa in position 31 is Ala, Ile or Val
  Variant (32)..(32): Xaa in position 32 is Ile or Val
  Variant (33)..(33): Xaa in position 33 is any amino acid
  Variant (34)..(34): Xaa in position 34 is Ala, Cys, Asp, Asn, Thr or Val
  Variant (35)..(35): Xaa in position 35 is Ala, Cys or Gly
  Variant (37)..(37): Xaa in position 37 is any or no amino acid
  Variant (39)..(39): Xaa in position 39 is Ala, Asp, Gly, Asn, Thr or Val
FXGXXXYXEXEFXXXXXKXXXXXGFXIXXXXXXXXGXGX

SEQ ID NO: 3945 - protein, 39 aa, Artificial sequence
  protein pattern
  Variant (3)..(3): Xaa in position 3 is any amino acid
  Variant (4)..(4): Xaa in position 4 is Glu, Lys or Arg
  Variant (5)..(5): Xaa in position 5 is Ala, Asn, Ser or Thr
  Variant (6)..(6): Xaa in position 6 is any amino acid
  Variant (8)..(8): Xaa in position 8 is any amino acid
  Variant (10)..(10): Xaa in position 10 is any amino acid
  Variant (12)..(15): Xaa in position 12 to 15 is any or no amino acid
  Variant (17)..(17): Xaa in position 17 is Ile or Val
  Variant (18)..(18): Xaa in position 18 is Ala, Ile, Leu or Val
  Variant (19)..(19): Xaa in position 19 is any amino acid
  Variant (20)..(20): Xaa in position 20 is Phe, Ile, Leu or Val
  Variant (21)..(21): Xaa in position 21 is Phe or Tyr
  Variant (22)..(22): Xaa in position 22 is Ile, Leu, Met or Val
  Variant (23)..(23): Xaa in position 23 is any amino acid
  Variant (24)..(24): Xaa in position 24 is Ala, Ser or Thr
  Variant (25)..(26): Xaa in position 25 to 26 is any amino acid
  Variant (27)..(27): Xaa in position 27 is Ile or Leu
  Variant (28)..(28): Xaa in position 28 is Ile, Leu or Val
  Variant (29)..(29): Xaa in position 29 is Cys or Gly
  Variant (30)..(30): Xaa in position 30 is Phe or Leu
  Variant (31)..(31): Xaa in position 31 is any amino acid
  Variant (32)..(32): Xaa in position 32 is Ile or Val
  Variant (33)..(34): Xaa in position 33 to 34 is any amino acid
  Variant (35)..(35): Xaa in position 35 is Asp or Asn
  Variant (36)..(36): Xaa in position 36 is Asp, Asn or Ser
  Variant (37)..(37): Xaa in position 37 is any amino acid
  Variant (38)..(38): Xaa in position 38 is Glu, Asn, Gln or Arg
NPXXXXPXAXKXXXXRXXXXXXXXXXXXXXXXXXXXXXL

SEQ ID NO: 3946 - protein, 24 aa, Artificial sequence
  protein pattern
  Variant (3)..(3): Xaa in position 3 is any amino acid
  Variant (4)..(4): Xaa in position 4 is any or no amino acid
  Variant (8)..(8): Xaa in position 8 is any amino acid
  Variant (9)..(9): Xaa in position 9 is Cys or Pro
  Variant (10)..(10): Xaa in position 10 is Ile, Leu or Val
  Variant (11)..(11): Xaa in position 11 is any amino acid
  Variant (12)..(12): Xaa in position 12 is Ile or Leu
  Variant (13)..(14): Xaa in position 13 to 14 is any amino acid
  Variant (15)..(15): Xaa in position 15 is Phe or Tyr
  Variant (16)..(16): Xaa in position 16 is Phe, Ile, Leu or Val
  Variant (18)..(18): Xaa in position 18 is His or Tyr
  Variant (19)..(22): Xaa in position 19 to 22 is any amino acid
  Variant (23)..(23): Xaa in position 23 is Lys or Arg
  Variant (24)..(24): Xaa in position 24 is Asp, Glu, Ser or Thr
FFXXYLAXXXXXXXXXGXXXXXXX

SEQ ID NO: 3947 - protein, 27 aa, Artificial sequence
  protein pattern
  Variant (3)..(3): Xaa in position 3 is Gly or Asn
  Variant (4)..(4): Xaa in position 4 is Phe, Ile, Leu or Val
  Variant (5)..(7): Xaa in position 5 to 7 is any amino acid
  Variant (8)..(8): Xaa in position 8 is Phe, Leu or Met
  Variant (9)..(9): Xaa in position 9 is Cys, Thr or Val
  Variant (10)..(10): Xaa in position 10 is any amino acid
  Variant (11)..(11): Xaa in position 11 is Ala, Gly or Ser
  Variant (12)..(12): Xaa in position 12 is any amino acid
  Variant (14)..(14): Xaa in position 14 is Ala or Ser
  Variant (15)..(15): Xaa in position 15 is Phe or Tyr
  Variant (16)..(16): Xaa in position 16 is Ala, Gly or Ser
  Variant (17)..(17): Xaa in position 17 is Ala or Gly
  Variant (18)..(18): Xaa in position 18 is any amino acid
  Variant (20)..(20): Xaa in position 20 is any amino acid
  Variant (21)..(21): Xaa in position 21 is Phe, Ile, Leu, Met or Val
  Variant (22)..(22): Xaa in position 22 is any amino acid
  Variant (23)..(23): Xaa in position 23 is Ile, Leu or Val
  Variant (24)..(24): Xaa in position 24 is Ala, Ser or Thr
  Variant (25)..(25): Xaa in position 25 is any amino acid
  Variant (26)..(26): Xaa in position 26 is Ala, Asn, Gln or Ser
FKXXXXXXXXXXFXXXXXEXXXXXXXE

SEQ ID NO: 3948 - DNA, 1503 bp, Saccharomyces cerevisiae
  CDS (1)..(1503)
atgaagtataataacagaaaactctcgttcaaccctaccacagtaagtatcgctggaacgttgcttacggtgttctttctcacaagactcgtgctttcgttcttctcgatatcgctattccagctggtaactttccaaggaatcttcaagccctatgttccagattttaaaaatactcccagcgtagagttctacgacctacgaaattaccaaggcaacaaagatggttggcaacagggtgaccgcatcttgttttgcgtgccactgagagatgcttctgagcatcttcccatgttttttaaccatctgaataccatgacatatccgcacaacctgattgatctgtcgtttttggtgagtgactcttcggataacaccatgggcgtgttactatccaatctacagatggcgcaatcgcaacaagacaagtccaaaaggtttggtaacatcgaaatctatgagaaggacttcggccaaatcattggtcagtccttttctgatcgtcacgggtttggcgcccagggccccagaagaaagctgatggccagggctcgtaattggcttgggtccgtggccctgaaaccataccactcctgggtttactggagagacgtggatgtcgaaaccatccccactaccatcatggaggatctaatgcatcacgacaaggacgtcattgtccccaacgtctggagacctttaccagactggctgggaaacattcaaccctacgatttaaattcatggaaggaatcagaagggggtcttcaattggcggattccctagacgaagatgctgtcattgtggaagggtacccagagtacgccacttggagacctcacctggcatacatgagagacccaaacggtaatccagaagacgaaatggaattggacggtattggaggggtctcgattctcgcgaaagctaaagtattcagaacaggctcacactttcctgcattctcctttgaaaagcacgcagagacagaagcattcggtaggctctcccgcaggatgaattacaatgtcatcggcttgccccattatgtcatctggcacatctacgaaccttccagcgacgacttaaagcacatggcttggatggctgaagaggagaagcggaaactagaagaagagagaattcgcgaattttacaacaagatctgggagattggatttgaagatgtcagagaccaatggaacgaagaaagagattcaatcttaaaaaacattgactccactttgaacaataaagtcactgtagactggtctgaagagggagatggctcggagctggtggactcaaagggtgactttgtctcaccaaacaaccaacaacaacaacaacagcaacaacaacaacaacagcagcagcagcaacagcaacagcaacaacagctcgacggcaacccgcaggggaaacctcttgatgacaacgacaagaacaagaaaaaacatcctaaagaagttccattagacttcgaccctgatagaaactag

SEQ ID NO: 3949 - protein, 500 aa, Saccharomyces cerevisiae
MKYNNRKLSFNPTTVSIAGTLLTVFFLTRLVLSFFSISLFQLVTFQGIFKPYVPDFKNTPSVEFYDLRNYQGNKDGWQQGDRILFCVPLRDASEHLPMFFNHLNTMTYPHNLIDLSFLVSDSSDNTMGVLLSNLQMAQSQQDKSKRFGNIEIYEKDFGQIIGQSFSDRHGFGAQGPRRKLMARARNWLGSVALKPYHSWVYWRDVDVETIPTTIMEDLMHHDKDVIVPNVWRPLPDWLGNIQPYDLNSWKESEGGLQLADSLDEDAVIVEGYPEYATWRPHLAYMRDPNGNPEDEMELDGIGGVSILAKAKVFRTGSHFPAFSFEKHAETEAFGRLSRRMNYNVIGLPHYVIWHIYEPSSDDLKHMAWMAEEEKRKLEEERIREFYNKIWEIGFEDVRDQWNEERDSILKNIDSTLNNKVTVDWSEEGDGSELVDSKGDFVSPNNQQQQQQQQQQQQQQQQQQQQQQLDGNPQGKPLDDNDKNKKKHPKEVPLDFDPDRN

SEQ ID NO: 3950 - DNA, 1380 bp, Magnaporthe grisea 70-15
  CDS (1)..(1380)
atgccactggatattccaatggctatccaccttccaacaggctggagttctcgccacacaggctttgcaaccgtggcgaccctgtttccattgagccttctcggtaacagcgagttatcccagatcgagaccgtccggtattatgacctgtctaatgtccagggcaccgcacggggatgggaacgagaggagcgcattctcatgtgcattcctctgcgtgatgcggaagcacatcttactatgttcttctcccatttgcgcaactttacctaccctcaccacctgatcgatctcgccttcctcgtctcggactcgaaggataggacgttggaagtactggttgagaacttggagaagatccaggcggacgaggacgaaaaccagtggtacggcgagatctctataatagagaaggactttggccaaaaggtgaatcaggatgtggagagtcgccacgggtttgccgcccaggcaagcaggcgaaagctgatggcgcaagctcgcaactggcttctcagtgctgctctgcgtccctatcattcatgggtctactggagagatgtggatgtggaaaccgctccattcacaatcctggaggatctgatgcgtcacaacaaggatgtcattgttccaaatgtgtggcgcccgcttcccgactggctcggcggagagcagccatacgacttgaactcgtggcaagagtccgagactgccctggctttggcggataccttggacgaagacgccgtcatcgtagagggctacgccgagtacgccacttggcggcctcatctggcctaccttcgggacccctatggagatcctgacatggagatggagattgatggtgtcgggggcgtcagtatccttgccaaggccaaggtgtttcgctctggttgccatttcccagccttcagtttcgaaaagcatgccgagactgaagggtttggcaagatggccaagaagatggactactcagttgttgggctgccgcactacactatttggcatttgtatgagcccagtgtcgacgatattaagcacatggaggaaatggaacgggagaggcttgcacgtgaggccgaagagaaacaaaaggccgacaaagagcaaaagcttaaggatactttcgccgaccccaacaaccagtgggagaaggataaggctgccatccaggacattgctaagagcgataaggctaaaggcgcaaaagcattggattcggaaaacaataaagctgcgaagaaggacgatgacaccaaggacacctcggtcaacgcaaagaaagccgacaagaacgacgatgtggataagccagcaaaagctaagaaagaaagcgaggcaggcaaagacgccaaggcggctaagaagcaacaatag

SEQ ID NO: 3951 - protein, 459 aa, Magnaporthe grisea 70-15
MPLDIPMAIHLPTGWSSRHTGFATVATLFPLSLLGNSELSQIETVRYYDLSNVQGTARGWEREERILMCIPLRDAEAHLTMFFSHLRNFTYPHHLIDLAFLVSDSKDRTLEVLVENLEKIQADEDENQWYGEISIIEKDFGQKVNQDVESRHGFAAQASRRKLMAQARNWLLSAALRPYHSWVYWRDVDVETAPFTILEDLMRHNKDVIVPNVWRPLPDWLGGEQPYDLNSWQESETALALADTLDEDAVIVEGYAEYATWRPHLAYLRDPYGDPDMEMEIDGVGGVSILAKAKVFRSGCHFPAFSFEKHAETEGFGKMAKKMDYSVVGLPHYTIWHLYEPSVDDIKHMEEMERERLAREAEEKQKADKEQKLKDTFADPNNQWEKDKAAIQDIAKSDKAKGAKALDSENNKAAKKDDDTKDTSVNAKKADKNDDVDKPAKAKKESEAGKDAKAAKKQQ

SEQ ID NO: 3952 - DNA, 1488 bp, Gibberella zeae PH-1 (anamorph: Fusarium graminearum)
  CDS (1)..(1488)
atgaactcccggcaccacgctgccgccttttcgaatggctacccacgcggcaacacatttgacatctcgccgcacaaattccagcctcgtacctacacacctgcccaacgacgtcgcaacaaactgttaactcgcctgggtatttgcgcagtaatcctgtttctcttcagcctttggctctggccttccagctccgtggcctcattggtttcttttgggcttctttcttcgagtggcacccccgagctcgagacggttcgatactacgatttgactaatgttcagggtaccgctcgtggctgggagcgtgaagaacgtattctcctatgtgtgccgcttcgtgatgccgaagcgcatctggagatgttcttttcccacatgcgcaacctgacatacccacaccacctgattgatctcgcattcctcgtttcagattcgaaggacaatactctcaaggtcctctccgacagtctggaggctatccaagccgacgaggaccctaagcagccttatggcgagatctccatcatcgagaaggactttggtcagaaggtcaaccaggatgtcgaaagccggcacggattcgccgctcaggctagtcgccgaaagctgatggcgcaggctcgaaactggcttctgagtgcggccctacgaccctatcattcatgggtttactggcgcgacgtcgacgtagagaccgcgccgttcaccattttggaagaccttatgcgccataacaaggatgttatcgtcccaaacgtttggcgacccttgcctgactggcttggtggtgaacagccttatgacttgaactcttggcaagagtccgaaacggctctagctctcgctgatactcttgatgaagatgcagtaatcgtcgagggatatgctgagtatgccacatggcgacctcatttggcctatcttcgtgatccatttggcgaccctgatatggagatggaaattgatggcgttggtggtgtcagcattttggccaaggccaaggttttccgatccggagttcacttcccagctttcagtttcgagaagcatgcagagacagaaggtttcggcaagatgtccaagagaatggggtactcggttattggtctaccccattatgtcatctggcatttgtatgagcctagtgtggatgatatccgtcatatggaggaaatggagaaagagcgacttgcccgcgagcaacaagaagcggataagaagaagaaccagcaaaagatcaaagaagaatacactgatactagaaatgagtgggagaaggacaagcaagagatgcaaaacttggcagctcaaccaaagcctgtcgtcaataatgcacccgtggtcccgcctcccaaagagcagcctgcccaacaggtcaacaacgttcctggtaatgcagcacagggcgaaaacaagccacaagcggttaagcaggaggctatgcaggtcgaagaagtcgcaaaggatgtgcccaaggccgcctaa

SEQ ID NO: 3953 - protein, 495 aa, Gibberella zeae PH-1 (anamorph: Fusarium graminearum)
MNSRHHAAAFSNGYPRGNTFDISPHKFQPRTYTPAQRRRNKLLTRLGICAVILFLFSLWLWPSSSVASLVSFGLLSSSGTPELETVRYYDLTNVQGTARGWEREERILLCVPLRDAEAHLEMFFSHMRNLTYPHHLIDLAFLVSDSKDNTLKVLSDSLEAIQADEDPKQPYGEISIIEKDFGQKVNQDVESRHGFAAQASRRKLMAQARNWLLSAALRPYHSWVYWRDVDVETAPFTILEDLMRHNKDVIVPNVWRPLPDWLGGEQPYDLNSWQESETALALADTLDEDAVIVEGYAEYATWRPHLAYLRDPFGDPDMEMEIDGVGGVSILAKAKVFRSGVHFPAFSFEKHAETEGFGKMSKRMGYSVIGLPHYVIWHLYEPSVDDIRHMEEMEKERLAREQQEADKKKNQQKIKEEYTDTRNEWEKDKQEMQNLAAQPKPVVNNAPVVPPPKEQPAQQVNNVPGNAAQGENKPQAVKQEAMQVEEVAKDVPKAA

SEQ ID NO: 3954 - DNA, 1539 bp, Candida glabrata CBS 138
  CDS (1)..(1539)
atgatgatgtcaattccaagttttcgggacttggcaaaactgaggaggagtgctgataataagagaggaggtgagtatagtttaccaatatcaagaactggttctgaagcgaccctttcaaaacatgataagttcatagccaagaagaaaaacttcaagttcagaaaactggcaactggagccataatagtcattgttattgtgtctatattcttggtgttcttcaacattgaagtaagcccgatatcattgccttcttcattttaccacaaggagtacctaccttttgaatttaaggatgccgcttatcacagttttgactttgaagatattgacatggatattgtctcaaaatttgaccaaggtataatgaattatctaatatccgagtatggtactgaaaatccttcagaaagtgacttagcagaatataatgataacttacaaatgctgctagattctacagtagagaagtatgatttagggaacttccaaggatcagctgatggatttgaacaacaagagcacattctagtttgtgtgccattgagagatgcagaagaagtcttgccacttatgtttaaaaacttaatgaacttgacctatccacacgaattgatagatttagcatttttggtcagtgattgctctgaaggtgacaaaacactcgaagcattggaaacatattcacagttactacaggagggtattcttcctgatatcttggccgacatggataactacaacaagggtaagagcaatgaaagtatacatttgaaatacatggagcctgattacctaaagcgggtaaaggctgcctataagccacctttccatccaaactattccaagcctttccgttcagttcagattttccagaaggatttcggacaagttattggtcaaggttttagtgataggcatgctgtgaaggttcaaggtattagaagaaagcttatgggcagagccagaaactggttaatgtcgaatgccttgaagccttatcattcatgggtctattggagagatgctgatgtcgaactatgtcccggtagtgttattgaagatctaatgctacaggattacgatgtcatagttccaaatgtatggcgtccattacctaagtttttgaattctgctcaaccatatgacctgaattcttggatggaatctaatgaagctctacagttagctaagactcttgatgaggatgacgttattgtagaaggttatgctgagtatccaacatatagagtgcacctagcatatatacgtgaagaggatggtgatcctactcaagttgtggatcttgatggtgttggtggtgtatctatcttggcgagagcaagagtatttagagagggtgttcatttcagtgcgtttacttttgaaaatcatgccgagacagaagcatttggtaaaatggcgaagaaggttggcttccgtgttggaggtctgcctcattatactctatggcatatttatgaacctagtgatgatgacctgttagcaatggcaaaattggaaaagggcaagtga

SEQ ID NO: 3955 - protein, 512 aa, Candida glabrata CBS 138
MMMSIPSFRDLAKLRRSADNKRGGEYSLPISRTGSEATLSKHDKFIAKKKNFKFRKLATGAIIVIVIVSIFLVFFNIEVSPISLPSSFYHKEYLPFEFKDAAYHSFDFEDIDMDIVSKFDQGIMNYLISEYGTENPSESDLAEYNDNLQMLLDSTVEKYDLGNFQGSADGFEQQEHILVCVPLRDAEEVLPLMFKNLMNLTYPHELIDLAFLVSDCSEGDKTLEALETYSQLLQEGILPDILADMDNYNKGKSNESIHLKYMEPDYLKRVKAAYKPPFHPNYSKPFRSVQIFQKDFGQVIGQGFSDRHAVKVQGIRRKLMGRARNWLMSNALKPYHSWVYWRDADVELCPGSVIEDLMLQDYDVIVPNVWRPLPKFLNSAQPYDLNSWMESNEALQLAKTLDEDDVIVEGYAEYPTYRVHLAYIREEDGDPTQVVDLDGVGGVSILARARVFREGVHFSAFTFENHAETEAFGKMAKKVGFRVGGLPHYTLWHIYEPSDDDLLAMAKLEKGK

SEQ ID NO: 3956 - DNA, 1344 bp, Candida glabrata CBS 138
  CDS (1)..(1344)
atgttcaagtacaataggcccttcctggtgagctgtgtagggtcgctgtttgcgctgtacctggtgctgaagtttgtcaacaatgtgtttgatctagccggcgtgctcgcggtgtggttctctgcgaactacatccctgattttagaagtgttcccggcgtggagttctatgacttgaatgactacacagggctgcccgacgggtggcaacgcaacgacaggatactgttctgtgtcccgttgagagacgctgccgagcacttgcccatgttcttcgaccatctgaacgcgatgacgtacccacaccacttgatagatctgtccttcctggtgtcggactcctcggacaacaccatgggcgtgctgatgcaccatttgcagcaggcccagaaggacaagaacaagcggttcgggaacatagagatattcgagaaggacttcggccagatcatcggacagtccttctcagacagacacgggttcgccgcccaggggcccagaagaaaactgatggccagggctcgtaactggctcggctcagtagcgatcaagccttaccactcgtgggtgtactggagagacgtcgacgtagaagtgatccccaggtctataatggaggacctgatgcaccacgataaggatgtgattgtccccaacgtgtggagaccgctgcctgactggctggggaacatccaaccttatgacttgaactcctgggtagaatcagaaggtggcttgcaattggccgacactttgtcagaggacagcgtcattgtcgaaggttaccccgaatacgccacttggagaacccacttggcttatatgagagacccaaacggtaacccagaggatgaaatgatgctagatggtatcggcggtgtctccatattgtcaaaggcacgcgtattcagagcaggctctcactttccagcgttttctttccagaagcacgctgaaacagaagcgttcggtaaattgtcccgcagaatgggcttcgacgtcgtaggattacctcactacgttatttggcatatctacgaaccttccaccgatgacttgaaatacatggcgtggatggcagaagaagagaagaggaaactagaagaaattcaactgcgtgagttctacgatagaatttgggaaataggctatgaggatgttcgcgatgactgggcacacgagaaagatattatattcaaaaatatggaaacacaaaaagatattgttgtggattggagcgacgatgccgatgtttcaagtaacggtgaccaatcactcaacaacgccaacgctaataacgctgctcaacaagacaagcctttggacttcgacccaaataaataa

SEQ ID NO: 3957 - protein, 447 aa, Candida glabrata CBS 138
MFKYNRPFLVSCVGSLFALYLVLKFVNNVFDLAGVLAVWFSANYIPDFRSVPGVEFYDLNDYTGLPDGWQRNDRILFCVPLRDAAEHLPMFFDHLNAMTYPHHLIDLSFLVSDSSDNTMGVLMHHLQQAQKDKNKRFGNIEIFEKDFGQIIGQSFSDRHGFAAQGPRRKLMARARNWLGSVAIKPYHSWVYWRDVDVEVIPRSIMEDLMHHDKDVIVPNVWRPLPDWLGNIQPYDLNSWVESEGGLQLADTLSEDSVIVEGYPEYATWRTHLAYMRDPNGNPEDEMMLDGIGGVSILSKARVFRAGSHFPAFSFQKHAETEAFGKLSRRMGFDVVGLPHYVIWHIYEPSTDDLKYMAWMAEEEKRKLEEIQLREFYDRIWEIGYEDVRDDWAHEKDIIFKNMETQKDIVVDWSDDADVSSNGDQSLNNANANNAAQQDKPLDFDPNK

SEQ ID NO: 3958 - DNA, 1506 bp, Kluyveromyces lactis NRRL Y-1140
  CDS (1)..(1506)
atggtcgtatttgtcaaggataaaaggctggagcttcccatgcaccatgattcaaagcaaaagggtaatcatttccgtccaaagagtggatttggtttattttttgccaaaattaatgggttaagatatgcaaagagcaggattgtatttctatttgcacttgtcctggtaagtacattcttactgctgtcgaagctagttggaggaaatgtcaacttaatgcagtatatccctacttctctagacgaacaagaatattacgattatgatttcaaagggttggacattgatactataaagaaatatgatgaaggtgtatcccactatataatatcgaaaggtggtatggaagcactttcttcagaagataaggaggcctttgagagggaagcagatatgctattagcgtctaccaccgacctctatgatttgagtcagtataacggtgcgagcaatggggctgcgaatagagatcacgtcttgttatgcgttccgttaagagatgcagcgtcattattgccgatgttgttcaaaaacttgatgaacttgacttatccacatgaattgatagatattgcatttttggttagtgactgtactgataatggtcgtactatgagctcactactcgatttctcaaaggaattacaaaatggtactttgtcaaagactttgcaggatttcgaggctgataaggataagggaaactcagcagagcaattgtatttaaagtatatgggaaaagactacttgaaaatggtgaaaaacgccttcaatcctcctttccatgacgattacgataagcctttccgctccatccaaatctttgagaaggatttcggtcaacagataggccaagggttcagcgatagacatgcagtaaaagtgcaaggtgtcagaaggaaacttatgggccgtgctagaaactggttaactgcaaatgccttgaaaccatatcattcgtgggtttattggagagacgtcgatgttgagctctgtcctggtactgtgatcgaagatttaatgaagcatgattacgacgtgatcgtaccaaacgtttggagacccctaccaactttcctcggtggtgcacaggcatacgacttgaattcatgggtcgaatccaatgaggcaataaaattggctaagactttagatgaagacgacgttattgtggaagggtatgcggagtatccaacttggagagttcatttaggttacctcagaaaagacaatggtaatcctgatgatcttcttgatttggatggtgttggtggtgtttcaattttggcaagagctcaactattccgtaaagggatacatttccctgcttttacgttcgagaaccatgcggagacagaggcttttggtaagatggcgaagaaaatgggattcaaggtcggtgggttgatgcactatacactatggcacatttatgaaccaagtgatgatgacctgagagaaattgctaaacttgaaagggaaagcaggcgaaaccaacgctga

SEQ ID NO: 3959 - protein, 501 aa, Kluyveromyces lactis NRRL Y-1140
MVVFVKDKRLELPMHHDSKQKGNHFRPKSGFGLFFAKINGLRYAKSRIVFLFALVLVSTFLLLSKLVGGNVNLMQYIPTSLDEQEYYDYDFKGLDIDTIKKYDEGVSHYIISKGGMEALSSEDKEAFEREADMLLASTTDLYDLSQYNGASNGAANRDHVLLCVPLRDAASLLPMLFKNLMNLTYPHELIDIAFLVSDCTDNGRTMSSLLDFSKELQNGTLSKTLQDFEADKDKGNSAEQLYLKYMGKDYLKMVKNAFNPPFHDDYDKPFRSIQIFEKDFGQQIGQGFSDRHAVKVQGVRRKLMGRARNWLTANALKPYHSWVYWRDVDVELCPGTVIEDLMKHDYDVIVPNVWRPLPTFLGGAQAYDLNSWVESNEAIKLAKTLDEDDVIVEGYAEYPTWRVHLGYLRKDNGNPDDLLDLDGVGGVSILARAQLFRKGIHFPAFTFENHAETEAFGKMAKKMGFKVGGLMHYTLWHIYEPSDDDLREIAKLERESRRNQR

SEQ ID NO: 3960 - DNA, 1353 bp, Kluyveromyces lactis NRRL Y-1140
  CDS (1)..(1353)
atgggcagcaagggtaagagcaggttcaatgccttgactgctgtgtccgtgataggatcagtggtaacggggtttcttataattcgaatgattttcccaatcatatggcagttcgtaccgttcgtctcaagtcctgtaactggtaacaggttcagaaatatacctggagtggaatattacgatttaattaattatcaggggaatgccaatggatggcagaccggtgatagggtggtgttctgtgttcctttgagagatgcagccgcacatttggatatgttcttcgataccttggataaattgacatacccacataacttgattgatctttcatttttggtcagtgattcaagcgatgataccatgaaaacacttctttctcatttgagaagagctcaatcaaaccaagacaaatcgagaagattcgctaacattgaaatttttgagaaagatttcggtcaaagtgtgggtcaatcgttttctgatagacacgggtttgcagctcaaggccctagaagaaaatccatggccagagctagaaattggcttgggtcagcggctttgaagccgtatcattcttacgtgtactggagagatgtcgacgttcaaactataccgaatactattttggaagatttaatgcatcatgataaagacgtcattgttccaaacgtctggagacctctacccgattggttgggaaatatacaaccatatgatttgaactcatgggttgaatctgagggtggattacaattagctgattctttggatgaagatgcttgtatcgtagaagggtacccggaatacgctacatggagaacacatttggcctacatgagagacccaagcggcgatcccgaggtcgagatggaactagacggaattggtggtgtttccatcttatctaaagctaaggtctttagaacaggttctcatttccctgcgttctctttcgagaaacatgctgaaactgaagcctttggtaaattatcacgtagaatgcaatacagtgttgtcggtctacctcattatgtgatctggcacatttacgaaccttcaagtgacgatttgaaacacatggcctggatggccgaggaagagaaacgtcgggttgaagagcaaaaaattcaagagttctatgctagaatttgggatattggtttcgatgacgtgagagatgagtgggagctagaaaggttacaaattttgaagaacattgatccgaatgtcctagataggaagattcaagtggactggtcagatgatgatgaagcagatgatggttcaaggaacggaggaaataatcaagattcacatgaagtaccactggactttgatcctgctcattaa

SEQ ID NO: 3961 - protein, 450 aa, Kluyveromyces lactis NRRL Y-1140
MGSKGKSRFNALTAVSVIGSVVTGFLIIRMIFPIIWQFVPFVSSPVTGNRFRNIPGVEYYDLINYQGNANGWQTGDRVVFCVPLRDAAAHLDMFFDTLDKLTYPHNLIDLSFLVSDSSDDTMKTLLSHLRRAQSNQDKSRRFANIEIFEKDFGQSVGQSFSDRHGFAAQGPRRKSMARARNWLGSAALKPYHSYVYWRDVDVQTIPNTILEDLMHHDKDVIVPNVWRPLPDWLGNIQPYDLNSWVESEGGLQLADSLDEDACIVEGYPEYATWRTHLAYMRDPSGDPEVEMELDGIGGVSILSKAKVFRTGSHFPAFSFEKHAETEAFGKLSRRMQYSVVGLPHYVIWHIYEPSSDDLKHMAWMAEEEKRRVEEQKIQEFYARIWDIGFDDVRDEWELERLQILKNIDPNVLDRKIQVDWSDDDEADDGSRNGGNNQDSHEVPLDFDPAH

SEQ ID NO: 3962 - DNA, 1335 bp, Debaryomyces hansenii CBS767
  CDS (1)..(1335): transl_table=12
atggaattactaactaaatatagacctgaaaggcccaaaaaggagccatggaggttcagcgagcataaatataagttttacatcacaggtataatattgtttataatcagcgttttgaggtttatgaccatgggtataccttcgttgtatgcgccgaatttttcgtcgtatccgtcagttcagtatttcgatttagcccactatgatgggagcgaggacggttggcagcgagaagaaagggttttattttgcgtgccattaagagatgcagcggcccatttgccgatgttttttggccacatgaagaacttgacatatccgcataacctaatcgatttggcgtttttggtgagtgattcatcggatgacacgatgggatcgttgaataaacatttacttgaaattcaaaatgaccctgatgtgtccatgagatttggagaaatcgaaattttcgaaaaggatttcggccaggctgttggtcaagggttttcagatagacacggtttcgcagctcaaggtccaagacgtaaacttatggcaagagccagaaactggttgtggtccgtcgcaattaaaccatatcattcatttgtatactggagagatgctgatgttgagacatcaccgcctacaattttggaggatcttatgcatcatgacaaggacgttattgtgcctaacgtatggagaccgcttcctgattggttaggcaaccaacaaccatatgatttaaattcctggcaagagtccgatggtggtcttcaattagctgaaagtttggatgaagatgcatgtattgttgagggatatgtagaataccaaacgtggagaccacacttggcgtatttaagagatccttatggtgaccaagaagtggaaatggatttggacggtattggtggtgtttcaattttaacaaaggccaaagtgttccgtagtggttcacactttccagcattctcatttgagaagcacgcagagacagaggcatttggtaagttgtctaaaagaatgggctactcagttgttgggttaccacactatgtcatttggcacatttatgaaccttcttcggatgatttgaagcatatggagtttatggctttagaggaagttagacaaaatgaagaagcaaaaattaagaaagtgtatgacaaagtttgggataaagcttttgaggatgttcaaggccgttggtctaaggaaaagcatctgttcttgaagaatactgatttatcgcatttgaaaccaatccaagtagattggccaggggttgacgactggaagattgatagctcaaaaaatgataaacagttagcggatttcaatccttaa

SEQ ID NO: 3963 - protein, 444 aa, Debaryomyces hansenii CBS767
MELLTKYRPERPKKEPWRFSEHKYKFYITGIILFIISVLRFMTMGIPSLYAPNFSSYPSVQYFDLAHYDGSEDGWQREERVLFCVPLRDAAAHLPMFFGHMKNLTYPHNLIDLAFLVSDSSDDTMGSLNKHLLEIQNDPDVSMRFGEIEIFEKDFGQAVGQGFSDRHGFAAQGPRRKLMARARNWLWSVAIKPYHSFVYWRDADVETSPPTILEDLMHHDKDVIVPNVWRPLPDWLGNQQPYDLNSWQESDGGLQLAESLDEDACIVEGYVEYQTWRPHLAYLRDPYGDQEVEMDLDGIGGVSILTKAKVFRSGSHFPAFSFEKHAETEAFGKLSKRMGYSVVGLPHYVIWHIYEPSSDDLKHMEFMALEEVRQNEEAKIKKVYDKVWDKAFEDVQGRWSKEKHLFLKNTDLSHLKPIQVDWPGVDDWKIDSSKNDKQLADFNP

SEQ ID NO: 3964 - DNA, 1326 bp, Debaryomyces hansenii CBS767
  CDS (1)..(1326): transl_table=12
atgtcgttatataagaagatagcaattggttttatttctgccatattgatatggatattattctttcgatctaatttctcttcacagacagcgtcagaaaaccacataaatggtaagacggaccctgaaaatgactacgaattataccatgctaccaaagacgggatagaaaaacaggatataacggggctaaaaagtgaagaggagaattataaagaaacggtggactattacgaccttaatgactataaagggtcaacggatggattgtctcagggagacgtagtattatttttgatgcctttaagaaatgcagaaagcgtacttcctatggcgttccataacttaatgaatttgacatatgatcattcattaattgatatagcattcttggtttccgattgttctccagatgatcgtactttggagaccgtttttgaatattctgtggctttgcaaaatggtactttattaaacaaactacaactcggtgaacgtcagagacacgcgaatgtaattaaaggatcatctgatttgtaccaattatacatggatccagattatatgaataatattaaaaagtcctataatcccgaaacattccacgaaaattatcataagccgttcagatcaatatccattttcaggaaagattttggtcaagtaataggacagggtttcagtgatagacatgctgtaaaagttcaaggaattcgtaggaaattgatggggagggccagaaattggttgacttctaatgcattgaaatcataccactcatgggtttactggagagacgtagatattgaaacttgcccgggttcagttattcaagatttaatgaaacatgactacgatgtgatggtgccaaatgtttggaggccattaccaacattcctaggtaatgaacagccgtatgatttgaattcctgggttgaatctgaagctgcggtagaattggcaaaatccttagatgaagaagatgttattgtggaaggttatgctgaatacccaacttggcgagtacatctagcgtatattagagatccaaatggggatccaaatgaaataattgacattgacggtgtgggtggtgtttctatattagcaagagctcgaattttcaggcagggtgttcatttcccagcatttacatttttaaaccatgctgaaaccgaggcgtttggtaaaatggccaaatctatgggattcagagttggtggtttaccacactatactatttggcatatttatgaacctagtgaagacgacttgcgagaaattgctaaaatggagaggaagaagaggagacaaaaaggtaaatga

SEQ ID NO: 3965 - protein, 441 aa, Debaryomyces hansenii CBS767
MSLYKKIAIGFISAILIWILFFRSNFSSQTASENHINGKTDPENDYELYHATKDGIEKQDITGLKSEEENYKETVDYYDLNDYKGSTDGLSQGDVVLFLMPLRNAESVLPMAFHNLMNLTYDHSLIDIAFLVSDCSPDDRTLETVFEYSVALQNGTLLNKLQLGERQRHANVIKGSSDLYQLYMDPDYMNNIKKSYNPETFHENYHKPFRSISIFRKDFGQVIGQGFSDRHAVKVQGIRRKLMGRARNWLTSNALKSYHSWVYWRDVDIETCPGSVIQDLMKHDYDVMVPNVWRPLPTFLGNEQPYDLNSWVESEAAVELAKSLDEEDVIVEGYAEYPTWRVHLAYIRDPNGDPNEIIDIDGVGGVSILARARIFRQGVHFPAFTFLNHAETEAFGKMAKSMGFRVGGLPHYTIWHIYEPSEDDLREIAKMERKKRRQKGK

SEQ ID NO: 3966 - DNA, 1401 bp, Yarrowia lipolytica CLIB122
  CDS (1)..(1401)
atgtttgaccgcaaccaaggcggactggccccgtcgactcgcaaaacgctgggcctggtttcagtgtttggcacagcattatatctatgcctgagcattctctcatgggtattttctggcgagctggcgctcgttcccttcacctcctccagcttgcctcccatggccgatctgggcatcgacagcgtgcaccactacgatctggcagactacacaggcagcgcacggggccaggaccgcaacgagcgagtgctgttcctggtgcctctcagagatgccgcagcccacctgcccatgctgttcgcccacatggacaagatgacatacccccacgtgctgatagatctggcgtttctggtgtccgattccaaggacgacaccatgggagtgttgctcaaggagctcaacacgctgcagagcaaccgagacgtgtccaagcggttcggtagcattgagatcttcgagaaggattttggccaggccgttggccagggattttctgaccgtcacggcttcgaggcccagggtccccgacgaaagctcatggctcgtgctcgaaactggctgctgtccgtggctctcagacccgatcactcgtgggtctactggcgagacgccgacgtggaaaaggtgcccactaccatcatggaggatctcatgagccacgacaaggacgtgattgtgcccaatgtgtggcgacccctgcccgactggctgggcaacgagcagccctacgatctcaactcgtggaaggagtctgacgccggtctccgactggctgacactctggacgaagacgctgttatcgtcgaaggatacgccgagtacgctacctggagaccccatcttgcctacctgcgagatccctttggtgatattcacgtggaaatggagctggacggtattggaggagtttccattcttgccaaggctgctgtattccgacacggcgcccatttccccgcattttcgttccagaagcacgccgagaccgaggggttcggcaaaatgtgcaagcgaatgggcatgtctgtggttggtcttccccactacaccatttggcacatttacgagccctctgacgacgatctgcgacacatggagtggatggcccagcaggacgagttgcgggagaaggagcgagtcctcaaggaggcccatgacaaggtatggcagtcgggctttgacaacgtcaagcaggagtgggagcgagaacgagagctgattctcaagaacgttgaactggactttgacgtgcatcaaaaggttcgggccaaaaaggcggaggagcagagcaaggccgaagccaaggttcacggccccgaggaggaaaaggtggtgcctggcgtgggcaaggccgctctgcagcctgacgccgtcaagaaggtggttcagggttaa

SEQ ID NO: 3967 - protein, 466 aa, Yarrowia lipolytica CLIB122
MFDRNQGGLAPSTRKTLGLVSVFGTALYLCLSILSWVFSGELALVPFTSSSLPPMADLGIDSVHHYDLADYTGSARGQDRNERVLFLVPLRDAAAHLPMLFAHMDKMTYPHVLIDLAFLVSDSKDDTMGVLLKELNTLQSNRDVSKRFGSIEIFEKDFGQAVGQGFSDRHGFEAQGPRRKLMARARNWLLSVALRPDHSWVYWRDADVEKVPTTIMEDLMSHDKDVIVPNVWRPLPDWLGNEQPYDLNSWKESDAGLRLADTLDEDAVIVEGYAEYATWRPHLAYLRDPFGDIHVEMELDGIGGVSILAKAAVFRHGAHFPAFSFQKHAETEGFGKMCKRMGMSVVGLPHYTIWHIYEPSDDDLRHMEWMAQQDELREKERVLKEAHDKVWQSGFDNVKQEWERERELILKNVELDFDVHQKVRAKKAEEQSKAEAKVHGPEEEKVVPGVGKAALQPDAVKKVVQG

SEQ ID NO: 3968 - DNA, 1356 bp, Yarrowia lipolytica CLIB122
  CDS (1)..(1356)
atgatttcgagagacaaaaagcccaacgagctgcccaagtacgaaaagactggtggagtcgactacagaaccgattttaagccaagaaagccgtcgccattatcacgaccaaacctgcaggtcccacaaatcacaaagctccgtctagctgctgtttttgtggctgtgacgttgattgtgttcctttttggttcgcaccacgaggtcagctactccgacgtgcttcaatcggtacagggatacaagcagtacgtgtcggattcgataaagcagggatccataagctcacagagccctgctgaggctcacagaaagccccttggtgaggtcagctttgtcgatctacgtgacgcagccggtgactggagcaaaaacagtcccctgaaccaacgcgttttggtgtgcatgcccctgcgaaacgtagaaaaggtggttcctatcatggcctcgcatctccgaaacctcacatatgaccacaacctaattgatctcgcttttctcatctcggacacggatgacaataccgtcaatgtgctggaggatgagatcaactcgatccagagcgacgccgaccccaaaatgcctttcaacaagatcacccttctgttccgtgactttggatctgctgtcggtacagacttctctgacagacacggcgttgctgtccaaggtgttcgaaggaagctcatgggccgggcccgaaactggctcctctcttctctgctggagcccacacattcctgggtctactggcgtgatgccgacattgagacctcacctcccaccatcatcgaggatctgatgaagcataacgttgatgtcattgttcctaatgtgtggagacctctgcctgattggctgggaagtgagcagccctacgacctgaactcgtggcaggagtcccagcctgcccttgatctcgctgctacactggacgaggatgaggtcatcgtggagggttacgctgagtaccctacgtaccggccccatctggcatacgtcagaaacgctgacggtaaccctgatgaacaggttgatctcgacggtattggaggtgtttccattctcgcccgatctcgtgtgttcctgtcaggtgctcacttcaccggtttcacttttgagaaccatgctgagaccgaggctttcggaaagatgtgcaagaagatgggcttcactgtacgagggctgcctcactacaccgtttggcacatgtacgaaccatcagaagatgatctcaaggagatgatgcgacgagaaaaggaagagaaggagaaggagaagcaggagaagggaaccaccgaaaacaaggatcttgaggtcaatgaggctcctgaagtcaaggaacttgaggcttaa

SEQ ID NO: 3969 - protein, 451 aa, Yarrowia lipolytica CLIB122
MISRDKKPNELPKYEKTGGVDYRTDFKPRKPSPLSRPNLQVPQITKLRLAAVFVAVTLIVFLFGSHHEVSYSDVLQSVQGYKQYVSDSIKQGSISSQSPAEAHRKPLGEVSFVDLRDAAGDWSKNSPLNQRVLVCMPLRNVEKVVPIMASHLRNLTYDHNLIDLAFLISDTDDNTVNVLEDEINSIQSDADPKMPFNKITLLFRDFGSAVGTDFSDRHGVAVQGVRRKLMGRARNWLLSSLLEPTHSWVYWRDADIETSPPTIIEDLMKHNVDVIVPNVWRPLPDWLGSEQPYDLNSWQESQPALDLAATLDEDEVIVEGYAEYPTYRPHLAYVRNADGNPDEQVDLDGIGGVSILARSRVFLSGAHFTGFTFENHAETEAFGKMCKKMGFTVRGLPHYTVWHMYEPSEDDLKEMMRREKEEKEKEKQEKGTTENKDLEVNEAPEVKELEA

SEQ ID NO: 3970 - DNA, 1287 bp, Candida albicans SC5314
  CDS (1)..(1287): transl_table=12
atgttttattcactaagaacgttgattataagtattgttattggtataataactttatttacaatttatacccaaatatctaattcaaaatcaggatatgctcctaatttatcaacatttgatacttctcaagtccaattttatgatttggccaattataaaggttcagctaatggttggcaatatgatgaacgagttttattttgtgttccattacgtgatgctgctcctcatttaccaatgtttttctctcatatgaaaaatttgacttatccacataatttaattgatttagcatttttagtttctgattctaaagatgatactatgggagaattaaaacgtcatttaagtgaaattcaaaaagatcctaaattggcatttggagaaattgaaatttttgaaaaagattttggtcaagttattggtcaaggtttttccgatcgtcatggttttgctgctcaaggtccaagaagaaaattaatggctagagcaagaaattggctttggacagtcgccgttaaaccatatcattcatttgtttattggagagatgctgatgttgaaacggtaccaccaacaattttggaagatttaatgcatcatgataaagatgttattgtccccaatgtttggcgtcctcttcctgattggttaggtaatcaacaaccatatgatttgaattcttggcaagaaagtgaaggaggtttacaattggccgatactttagatgaagatgcttgtattgttgaaggttatgttgaatatcaaacttggagacctcatttagcttatcttcgagacccttatggtgatcctgaagtagaaatggatttagatggtattggtggagtctctattttgactaaagcaaatgtattccgtcaaggatctcatttcccagcattttcatttgaaaaacatgcagaaactgaagcatttgggaaattaagtaaacgaatgggattttctgttgttgggttacctcattatgtgatttggcatatttatgaaccttcatctgatgatttaaaacatatggaatggatggcatctgaagaagttcgtcaacaagaagaagctaaaattaaaaaagtttacgataaagtatggaataaagcttttgaagatgttcaaaataattgggataaagaaagaagtaaatttttgaaaaataccgatatgagtaatgtaaggaaaattaaagttgattggtcaggagttgatgattttgatattgataaaaattctcatgatgataaaaaattagccgatttcaatccataa

SEQ ID NO: 3971 - protein, 428 aa, Candida albicans SC5314
MFYSLRTLIISIVIGIITLFTIYTQISNSKSGYAPNLSTFDTSQVQFYDLANYKGSANGWQYDERVLFCVPLRDAAPHLPMFFSHMKNLTYPHNLIDLAFLVSDSKDDTMGELKRHLSEIQKDPKLAFGEIEIFEKDFGQVIGQGFSDRHGFAAQGPRRKLMARARNWLWTVAVKPYHSFVYWRDADVETVPPTILEDLMHHDKDVIVPNVWRPLPDWLGNQQPYDLNSWQESEGGLQLADTLDEDACIVEGYVEYQTWRPHLAYLRDPYGDPEVEMDLDGIGGVSILTKANVFRQGSHFPAFSFEKHAETEAFGKLSKRMGFSVVGLPHYVIWHIYEPSSDDLKHMEWMASEEVRQQEEAKIKKVYDKVWNKAFEDVQNNWDKERSKFLKNTDMSNVRKIKVDWSGVDDFDIDKNSHDDKKLADFNP

SEQ ID NO: 3972 - DNA, 1524 bp, Candida albicans SC5314
  CDS (1)..(1524): transl_table=12
atggcaaaaaatccaagaattcagatttaccagtgtatgtttaactttttatttttttttttcacgttgttgttgttgttttgttgttcaatactaacaaaattgaattttttttttttcatatttagatttaataagtttactcctaaaaagcattcagatcgtgtgttgataaagcgagtcttgtatactttggtatttttattggtaacgtatacgatatattcaagagtgttaacaggtgatagcaggataccgcaatcgcaggatcgacaacaatcaccgaccaacgacaataatcatgaagtgtataaagttacaaaagatggagtatataagcaggaagttactggtgttgttgaagaagtagaagaggaagaactaaaggaggttactacagaagatctctacaagtcgaatgttgacatttttgatttaaatgattatcaagggtctcaagaaggtgctaaaaatggcgatattctattatttcttatgcctttgagaaatgccgaacacgttttaccaatggcattctataatcttatgaacctcacttacgatcatcgtttgattgatattgcatttttggtttcggattgttcaccagatgacaccacgttggaaactgtttttgaatattcagtggctttacaaaatggaactttggttgacaagttgaaacatgaagaagagttgaagaattcaggtaatgtcaggggcactagtgatttatatcaatcgtatatggagccatcttatattgaaagcgtaaagaaagcctatagtaatcctgagtcgcatcatccaaactataggaccccatttagatcggtcactattttcaaaaaagattttggtcaagtcattgggcaagggttcagtgatagacatgctgttaaagtgcaagggattcgtagaaagttaatgggtagagcaagaaactggcttacttctgctgccttgaaaccataccattcctgggtttattggagagatgctgatattgaaacgtgccctggtgatgttattgaagagttgatgctgcataattacgatgttatggtacccaatgtgtggagacctttacctacatttttaggcaacgagcagccatacgatttgaactcttgggttgaatcagatgctggattagaattggcgaaaacactaaacgaagacgatgttattgttgaagggtatgctgagtatcctacttggagagcacatttggcatacatacgggatgctaatggtgatcctcgagaagtaattgatttagacggtgttggtggtgtgtcgatattggcacgagcaaagatttttagacaaggggtacatttcccagcatttacatttttaaaccacgctgaaactgaggcctttggtaaaatggccaaaaaaatgggattcagtgttggtggattgcctcattataccatatggcatatttatgaaccaagtgaagatgatttgaaagaaattgcgagattggaaagaaagaaaagaagacagaagtcataa

SEQ ID NO: 3973 - protein, 507 aa, Candida albicans SC5314
MAKNPRIQIYQCMFNFLFFFFTLLLLFCCSILTKLNFFFFIFRFNKFTPKKHSDRVLIKRVLYTLVFLLVTYTIYSRVLTGDSRIPQSQDRQQSPTNDNNHEVYKVTKDGVYKQEVTGVVEEVEEEELKEVTTEDLYKSNVDIFDLNDYQGSQEGAKNGDILLFLMPLRNAEHVLPMAFYNLMNLTYDHRLIDIAFLVSDCSPDDTTLETVFEYSVALQNGTLVDKLKHEEELKNSGNVRGTSDLYQSYMEPSYIESVKKAYSNPESHHPNYRTPFRSVTIFKKDFGQVIGQGFSDRHAVKVQGIRRKLMGRARNWLTSAALKPYHSWVYWRDADIETCPGDVIEELMSHNYDVMVPNVWRPLPTFLGNEQPYDLNSWVESDAGLELAKTLNEDDVIVEGYAEYPTWRAHLAYIRDANGDPREVIDLDGVGGVSILARAKIFRQGVHFPAFTFLNHAETEAFGKMAKKMGFSVGGLPHYTIWHIYEPSEDDLKEIARLERKKRRQKS

SEQ ID NO: 3974 - DNA, 1353 bp, Hansenula anomala
  CDS (1)..(1353)
atgaattacaagactcaaaatattcaaaaccaatacatcaaccgttttttgagcataacgaagaacaaatattcaatatcaattattggagttgtgataacattaatcattttaataaatttcatagtacaagttgtattgggtcaactttatgttccaaatttttcaagtgttccatctgttgattttttcgatttgaaaaactatgaaggattatcagatggttggcaacatgaagaacgtgtgttattttgtgtcccattaagagatgctgctgctcatttaccaatgtttttcagccatatgaaaaatttaacttatcctcatcatttaattgatttatcatttttagtttctgattcttcagatgatacaatggaagtcttaaaacaaaatctaaaagatattcaaacagattcaaataaagcgatgagatttggagaaattgaaatttttgaaaaagactttggtcaagttatcggccaaggttttagtgatcgccatggtttcgaagctcaaggaccaagaagaaaattaatggctagagcaagaaattggttatggactgttagtgttaaaccttatcattcctgggtttattggagagatgctgatgtggaaactgttcctccaactattttagaagatttaatgcatcatggtaaagatgttattgttccaaatgtttggagacctctacctgattggttgggaaatcaacaaccttatgacttgaattcatggcaagaaagtgaaggtggtttacaattggctaaaacacttggtgaagatgctgttattgtggaaggttatgttgagtatgcaacatggagacctcatttagcttatttaagagacccatatggtgatccagaagttgaaatggatttagatggtattggaggtgtttcaatcttggctagagctaaagttttcaaaactggtgcgggattcccagctttttcatttgaaaaacatgccgaaactgaagcatttggtaaattatgtaaaagaatgggctattcagtcgttggtctacctcattatgttatatggcatatttatgaaccttcttctgatgatttgaaacatatggaatggatggccaaagaagaagctagacaattggaagaatcaaaattaaaacaattttatgataaaatttggtctgaaggttttgaagatgttcgtgaagattggaaaaatgatcgtataaacattttcaaaaacacagataccaacaaaatcaagaatgttaaagttgattggtctgatgctgataatttccaatataaaagcccgttaggtaaggataaagataaagttttagccgcatttgatccttcaagttag

SEQ ID NO: 3975 - protein, 450 aa, Hansenula anomala
MNYKTQNIQNQYINRFLSITKNKYSISIIGVVITLIILINFIVQVVLGQLYVPNFSSVPSVDFFDLKNYEGLSDGWQHEERVLFCVPLRDAAAHLPMFFSHMKNLTYPHHLIDLSFLVSDSSDDTMEVLKQNLKDIQTDSNKAMRFGEIEIFEKDFGQVIGQGFSDRHGFEAQGPRRKLMARARNWLWTVSVKPYHSWVYWRDADVETVPPTILEDLMHHGKDVIVPNVWRPLPDWLGNQQPYDLNSWQESEGGLQLAKTLGEDAVIVEGYVEYATWRPHLAYLRDPYGDPEVEMDLDGIGGVSILARAKVFKTGAGFPAFSFEKHAETEAFGKLCKRMGYSVVGLPHYVIWHIYEPSSDDLKHMEWMAKEEARQLEESKLKQFYDKIWSEGFEDVREDWKNDRINIFKNTDTNKIKNVKVDWSDADNFQYKSPLGKDKDKVLAAFDPSS

SEQ ID NO: 3976 - DNA, 1347 bp, Neurospora crassa
  CDS (1)..(1347)
atgcgagcggatattccaatgggtacccgcgaggaaacacctttgagatttctcctcacagcgctggtatcattacttctctttgggctgttcgtttggcccggcgattcggggtctttctcctggcttggctccggttctgaagatttccaactcgagacggtgcgatactacgacctgtctaacgtgcagggcaccgcgaaaggatgggagagagaggagcgaattttgatctgcgtgccgctgcgcgatgccgaagtgcatatgcccatgttcttcggtcacctcctcaacctgacgtatcctcaccatctgatcgatctcgctttccttgtttcggactcgaaagacaacaccttggcggttcttgaacgcgagcttacggctattcaagctagcaccgacccgtccaagcactttggcgaaatctccatcatcgagaaagactttggacaaaaagttaatcaggatgtggaaagccgccacggtttcgccgcgcaggcgagcagaagaaagctcatggcccaagctagaaattggctccttagcgccgcccttcggccgtatcattcgtgggtctactggcgtgatgtcgacgtggagacggcgcctaccacgatcttggaagatctgatgcgccacaacaaggatgtgattgtgccaaatgtttggcgtccgctacctgactggctgggcggagaacagccctacgaccttaactcctgggccgagtccgaaaccgccctcgcactcgcggatactctcgacgaagatgcagttatcgtggagggatacgcagaatatgctacctggcgtccccatctcgcatatctccgggacccctatggcgatcccgacatggaaatggagatcgatggcgttggtggagtgagtattctggcaaaggccaaggttttccgttacggcgtccacttcccggcgttcagcttcgaaaaacatgccgagacagaagcttttggaaagatgtcgagaaggatgggcttctcagttgttggccttcctcattatactatctggcatttgtacgagcctagtgtagacgatattaagcacatggaggtccctaacagtcggcagcaaatggagcaggagagactcgctcgcgagaaggaggaaaaggagaaagcgatgaaggagcagaagatgaaggagtcttttggcgacgccactggccaatgggagaaggacaagaacgaaatacaaaacctcgccatgcaggagaacaagaaggcggaagagcaaccagcagcaggacaacaaggcggaccggctgacggaccagccaatgctgctcccaaggaggagaagaaggagggcactcagtga

SEQ ID NO: 3977 - protein, 448 aa, Neurospora crassa
MRADIPMGTREETPLRFLLTALVSLLLFGLFVWPGDSGSFSWLGSGSEDFQLETVRYYDLSNVQGTAKGWEREERILICVPLRDAEVHMPMFFGHLLNLTYPHHLIDLAFLVSDSKDNTLAVLERELTAIQASTDPSKHFGEISIIEKDFGQKVNQDVESRHGFAAQASRRKLMAQARNWLLSAALRPYHSWVYWRDVDVETAPTTILEDLMRHNKDVIVPNVWRPLPDWLGGEQPYDLNSWAESETALALADTLDEDAVIVEGYAEYATWRPHLAYLRDPYGDPDMEMEIDGVGGVSILAKAKVFRYGVHFPAFSFEKHAETEAFGKMSRRMGFSVVGLPHYTIWHLYEPSVDDIKHMEVPNSRQQMEQERLAREKEEKEKAMKEQKMKESFGDATGQWEKDKNEIQNLAMQENKKAEEQPAAGQQGGPADGPANAAPKEEKKEGTQ

SEQ ID NO: 3978 - DNA, 1329 bp, Candida albicans
  CDS (1)..(1329): transl_table=12
atgtttttattggtaacgtatacgatatattcaagagtgttaacaggtgatagcaggataccgcaatcgcaggatcgacaacaatcaccgaccaacgacaataatcatgaagtgtataaagttacaaaagatggagtatataagcaggaagttactggtgttgttgaagaagtagaagaggaagaactaaaggaggttactacagaagatctctacaagtcgaatgttgacatttttgatctaaatgattatcaagggtctcaagaaggtgctaaaaatggcgatattctattatttcttatgcctttgagaaatgccgaacacgttttaccaatggcattctataatcttatgaacctcacttacgatcatcgtttgattgatattgcatttttggtttcggattgttcaccagatgacaccacgttggaaactgtttttgaatattcagtggctttacaaaatggaactttggttgacaagttgaaacatgaagaagagttgaagaattcaggtaatgtcaggggcactagtgatttatatcaatcgtatatggagccatcttatattgaaagcgtaaagaaagcctatagtaatcctgagtcgcatcatccaaactataggaccccatttagatcggtcactattttcaaaaaagattttggtcaagtcattgggcaagggttcagtgatagacatgctgttaaagtgcaagggattcgtagaaagttaatgggtagagcaagaaactggcttacttctgctgccttgaaaccataccattcctgggtttattggagagatgctgatattgaaacgtgccctggtgatgttattgaagagttgatgctgcataattacgatgttatggtacccaatgtgtggagacctttacctacatttttaggcaacgagcagccatacgatttgaactcttgggttgaatcagatgctggattagaattggcgaaaacactaaacgaagacgatgttattgttgaagggtatgctgagtatcctacttggagagcacatttggcatacatacgggatgctaatggtgatcctcgagaagtaattgatttagacggtgttggtggtgtgtcgatattggcacgagcaaagatttttagacaaggggtacatttcccagcatttacatttttaaaccacgctgaaactgaggcctttggtaaaatggccaaaaaaatgggattcagtgttggtggattgcctcattacaccatatggcatatttatgaaccaagtgaagatgatttgaaagaaattgcgagattggaaagaaagaaaagaagacagaagtcataa

SEQ ID NO: 3979 - protein, 442 aa, Candida albicans
MFLLVTYTIYSRVLTGDSRIPQSQDRQQSPTNDNNHEVYKVTKDGVYKQEVTGVVEEVEEEELKEVTTEDLYKSNVDIFDLNDYQGSQEGAKNGDILLFLMPLRNAEHVLPMAFYNLMNLTYDHRLIDIAFLVSDCSPDDTTLETVFEYSVALQNGTLVDKLKHEEELKNSGNVRGTSDLYQSYMEPSYIESVKKAYSNPESHHPNYRTPFRSVTIFKKDFGQVIGQGFSDRHAVKVQGIRRKLMGRARNWLTSAALKPYHSWVYWRDADIETCPGDVIEELMSHNYDVMVPNVWRPLPTFLGNEQPYDLNSWVESDAGLELAKTLNEDDVIVEGYAEYPTWRAHLAYIRDANGDPREVIDLDGVGGVSILARAKIFRQGVHFPAFTFLNHAETEAFGKMAKKMGFSVGGLPHYTIWHIYEPSEDDLKEIARLERKKRRQKS

SEQ ID NO: 3980 - DNA, 1608 bp, Saccharomyces cerevisiae
  CDS (1)..(1608)
atgggcatgttttttaatttaaggtcaaatataaagaagaaagccatggacaatggactaagcctgcccatttcaaggaacggtagctcgaacaacatcaaggacaaacgctcagagcataactccaactcattaaagggcaaatacaggtaccagccgcgctccacaccgtctaaattccagcttacggtgagtatcacatctcttattattatcgccgttctgtcgttatatctctttatatcatttctctccggaatgggcattggtgtatccacgcaaaatggtaggtcgttgttgggttcctcaaaatcctccgaaaattacaagactatcgacctagaagatgaagaatattacgactatgattttgaggatatcgatcctgaagtgatttcaaaatttgatgatggtgtgcaacattatctaatatcacaatttggttcagaagtgttgactcccaaggatgatgaaaaataccaaagggaactcaacatgctttttgattccactgttgaggagtacgacctgtcgaattttgaaggtgctccgaatggattggaaacacgtgatcacattcttttatgcattccactaagaaacgctgcggatgtattgccattaatgttcaagcatttaatgaacctaacctatccacacgagctgattgatctggcctttttagtcagtgattgctcagaaggtgacactacgttggatgctttaatagcgtattctaggcacttacaaaatggcacgttgtctcagatttttcaagagattgacgctgtcattgattcgcaaacaaaaggcaccgataaattatatcttaaatatatggacgaaggttatatcaaccgtgtccaccaggcattttcaccaccattccatgaaaattatgacaagccatttagatcagtacaaattttccaaaaggattttggccaagtaattggacaaggttttagtgacagacatgccgttaaggttcaaggtataagacgaaaactaatggggagggcaagaaattggttaactgccaatgctttgaaaccttaccactcatgggtttattggagagatgctgatgtagagctgtgccctggttcagtcattcaagatttgatgagcaaaaactacgatgttatcgtccctaacgtttggagaccactacctacatttttgggaactgaacaaccatatgatttgaattcttggatggaatctcaggaggcactagcattggcaaagactcttgacgaagatgatgttattgtagaaggctatgcagaatatcctacgtggagagttcacttagcctatatcagagatgcagaaggtgatccaaatgaagcggtggacttggacggtgtagggggagtttctattttggcgaaggccaaaatatttagaaacggggtacagtttcctgcatttacttttgaaaatcatgcagaaacagaagcatttggtaaaatggcaaagaaaatggggtacagggttggtggtttaccgcattatactatttggcatatttatgaaccgagcgatgacgatttgaaggaaattgcgtcaagggaaagagagaagagaagacaatcagagtaa

SEQ ID NO: 3981 - protein, 535 aa, Saccharomyces cerevisiae
MGMFFNLRSNIKKKAMDNGLSLPISRNGSSNNIKDKRSEHNSNSLKGKYRYQPRSTPSKFQLTVSITSLIIIAVLSLYLFISFLSGMGIGVSTQNGRSLLGSSKSSENYKTIDLEDEEYYDYDFEDIDPEVISKFDDGVQHYLISQFGSEVLTPKDDEKYQRELNMLFDSTVEEYDLSNFEGAPNGLETRDHILLCIPLRNAADVLPLMFKHLMNLTYPHELIDLAFLVSDCSEGDTTLDALIAYSRHLQNGTLSQIFQEIDAVIDSQTKGTDKLYLKYMDEGYINRVHQAFSPPFHENYDKPFRSVQIFQKDFGQVIGQGFSDRHAVKVQGIRRKLMGRARNWLTANALKPYHSWVYWRDADVELCPGSVIQDLMSKNYDVIVPNVWRPLPTFLGTEQPYDLNSWMESQEALALAKTLDEDDVIVEGYAEYPTWRVHLAYIRDAEGDPNEAVDLDGVGGVSILAKAKIFRNGVQFPAFTFENHAETEAFGKMAKKMGYRVGGLPHYTIWHIYEPSDDDLKEIASREREKRRQSE

SEQ ID NO: 3982 - DNA, 1293 bp, Schizosaccharomyces pombe
  CDS (1)..(1293)
atgaaagcaaatagagactttggaagagatggtggcccttttagtattacgccgaatcgattccagcctaaatccagcggaaatcccatattccgacagaaaaccattcgaactgttgggataattgctttaacactggtcttatttttattcttccatcgttcattcttctcttcttttggtgaatttcccagtttttcttctaccgcgaacgctcctaattctgatgtgcaagaatatgacttgcgaaaagtaatgaacgctaaatttactggagattattcaccgaaagaaaaggtgttgatttgtgctccacttcgaaatgctgcagaacatcttaatatgttttttggtcacatgaataacctgacttatcctcacgaacttatagaccttgcctttctaatttcagacactgatgataatactctcgaggttttgaagcaacatttagacgctattcaaaatgacgaggacgaatctaagcattttaacaatgtccttatcatgctaaaggacttcggtgctattttcggtcaagaattcagtgaccgtcatggatttgcggcacaaggtccccgaaggaaattaatggctcgtgctcgtaattggcttttgtcagccgctatacagccttaccattcttgggtttactggagagatgttgacgtggagactgctccaaacactattttggaggatcttatgcgccatgataaagacattattgttcctaacgtttatagacccttaccagattggttgggcaatgagcaaccatatgatttaaattcatgggctgaatctgagactgctcttcagcttgcagatactttgggcgaagacgacgttattgtagaaggatacgcagagtatgctacctggcgccctcatttggcttaccttcgtgatcctaatggtgacccatctgttgaaatgccactggatggtattggtggtgtatctattatgtctaaagctaaagtacacctagaaggttgcgagtttcccgcattttcatttgaaaagcatgctgaaaccgaaggatttggaaaaatggctaagcggatggggttttccgtttacggacttcctcactatgttatttggcatatttatgaacctagcgatgatgataagcgtattatggctgaaatggaacgcgaaaggaaagaaagggaggccgcagagcttgaagaggctaaaaagtatcagactgctggattcacgcaaccagatgatcagggtgctgaagaaggtcctttggcacatgcagacgatcatgttgattaa

SEQ ID NO: 3983 - protein, 430 aa, Schizosaccharomyces pombe
MKANRDFGRDGGPFSITPNRFQPKSSGNPIFRQKTIRTVGIIALTLVLFLFFHRSFFSSFGEFPSFSSTANAPNSDVQEYDLRKVMNAKFTGDYSPKEKVLICAPLRNAAEHLNMFFGHMNNLTYPHELIDLAFLISDTDDNTLEVLKQHLDAIQNDEDESKHFNNVLIMLKDFGAIFGQEFSDRHGFAAQGPRRKLMARARNWLLSAAIQPYHSWVYWRDVDVETAPNTILEDLMRHDKDIIVPNVYRPLPDWLGNEQPYDLNSWAESETALQLADTLGEDDVIVEGYAEYATWRPHLAYLRDPNGDPSVEMPLDGIGGVSIMSKAKVHLEGCEFPAFSFEKHAETEGFGKMAKRMGFSVYGLPHYVIWHIYEPSDDDKRIMAEMERERKEREAAELEEAKKYQTAGFTQPDDQGAEEGPLAHADDHVD

SEQ ID NO: 3984 - DNA, 27 bp, Artificial sequence
  primer
atgaagtataataacagaaaactctcg

SEQ ID NO: 3985 - DNA, 24 bp, Artificial sequence
  primer
ctagtttctatcagggtcgaagtc

SEQ ID NO: 3986 - protein, 354 aa, Artificial sequence
  consensus sequence
  Variant (2)..(4): Xaa in position 2 to 4 is any amino acid
  Variant (7)..(10): Xaa in position 7 to 10 is any amino acid
  Variant (12)..(14): Xaa in position 12 to 14 is any amino acid
  Variant (15)..(15): Xaa in position 15 is any or no amino acid
  Variant (17)..(23): Xaa in position 17 to 23 is any amino acid
  Variant (24)..(25): Xaa in position 24 to 25 is any or no amino acid
  Variant (27)..(29): Xaa in position 27 to 29 is any amino acid
  Variant (33)..(33): Xaa in position 33 is any amino acid
  Variant (35)..(37): Xaa in position 35 to 37 is any amino acid
  Variant (39)..(39): Xaa in position 39 is any amino acid
  Variant (41)..(41): Xaa in position 41 is any amino acid
  Variant (43)..(48): Xaa in position 43 to 48 is any amino acid
  Variant (51)..(51): Xaa in position 51 is any amino acid
  Variant (53)..(53): Xaa in position 53 is any amino acid
  Variant (57)..(58): Xaa in position 57 to 58 is any amino acid
  Variant (64)..(65): Xaa in position 64 to 65 is any amino acid
  Variant (66)..(67): Xaa in position 66 to 67 is any or no amino acid
  Variant (69)..(69): Xaa in position 69 is any amino acid
  Variant (71)..(73): Xaa in position 71 to 73 is any amino acid
  Variant (75)..(81): Xaa in position 75 to 81 is any amino acid
  Variant (83)..(88): Xaa in position 83 to 88 is any amino acid
  Variant (89)..(138): Xaa in position 89 to 138 is any or no amino acid
  Variant (140)..(143): Xaa in position 140 to 143 is any amino acid
  Variant (145)..(146): Xaa in position 145 to 146 is any amino acid
  Variant (152)..(153): Xaa in position 152 to 153 is any amino acid
  Variant (156)..(156): Xaa in position 156 is any amino acid
  Variant (162)..(165): Xaa in position 162 to 165 is any amino acid
  Variant (168)..(168): Xaa in position 168 is any amino acid
  Variant (174)..(174): Xaa in position 174 is any amino acid
  Variant (181)..(183): Xaa in position 181 to 183 is any amino acid
  Variant (185)..(186): Xaa in position 185 to 186 is any amino acid
  Variant (197)..(197): Xaa in position 197 is any amino acid
  Variant (199)..(199): Xaa in position 199 is any amino acid
  Variant (201)..(202): Xaa in position 201 to 202 is any amino acid
  Variant (204)..(207): Xaa in position 204 to 207 is any amino acid
  Variant (212)..(212): Xaa in position 212 is any amino acid
  Variant (214)..(215): Xaa in position 214 to 215 is any amino acid
  Variant (228)..(229): Xaa in position 228 to 229 is any amino acid
  Variant (232)..(233): Xaa in position 232 to 233 is any amino acid
  Variant (242)..(242): Xaa in position 242 is any amino acid
  Variant (245)..(247): Xaa in position 245 to 247 is any amino acid
  Variant (249)..(249): Xaa in position 249 is any amino acid
  Variant (252)..(253): Xaa in position 252 to 253 is any amino acid
  Variant (255)..(255): Xaa in position 255 is any amino acid
  Variant (258)..(258): Xaa in position 258 is any amino acid
  Variant (265)..(265): Xaa in position 265 is any amino acid
  Variant (268)..(268): Xaa in position 268 is any amino acid
  Variant (272)..(272): Xaa in position 272 is any amino acid
  Variant (277)..(277): Xaa in position 277 is any amino acid
  Variant (280)..(281): Xaa in position 280 to 281 is any amino acid
  Variant (283)..(283): Xaa in position 283 is any amino acid
  Variant (285)..(290): Xaa in position 285 to 290 is any amino acid
  Variant (293)..(293): Xaa in position 293 is any amino acid
  Variant (300)..(301): Xaa in position 300 to 301 is any amino acid
  Variant (303)..(304): Xaa in position 303 to 304 is any amino acid
  Variant (307)..(307): Xaa in position 307 is any amino acid
  Variant (309)..(309): Xaa in position 309 is any amino acid
  Variant (315)..(315): Xaa in position 315 is any amino acid
  Variant (317)..(318): Xaa in position 317 to 318 is any amino acid
  Variant (324)..(324): Xaa in position 324 is any amino acid
  Variant (328)..(331): Xaa in position 328 to 331 is any amino acid
  Variant (334)..(335): Xaa in position 334 to 335 is any amino acid
  Variant (337)..(337): Xaa in position 337 is any amino acid
  Variant (343)..(343): Xaa in position 343 is any amino acid
  Variant (347)..(347): Xaa in position 347 is any amino acid
  Variant (352)..(352): Xaa in position 352 is any amino acid
VXXXDLXXXXGXXXXGXXXXXXXXXLXXXPLRXAXXXLXMXFXXXXXXTYXHXLIDXXFLVSDXXXXDXTXXXLXXXXXXXQXXXXXXXXXXXXXXXXXXXXXXXXXXXXXXXXXXXXXXXXXXXXXXXXXXXXXXXXFXXXXIXXKDFGQXXGQXFSDRHXXXXQGXRRKLMXRARNWLXXXAXXPYHSWVYWRDXDXEXXPXXXXEDLMXHXXDVIVPNVWRPLPXXLGXXQPYDLNSWXESXXXLXLAXXLXEDXVIVEGYXEYXTWRXHLAYXRDXXGXPXXXXXXDGXGGVSILXXAXXFRXGXHFPAFXFXXHAETEXFGKXXXXMGXXVXGLPHYXIWHXYEPSXDD

SEQ ID NO: 3987 - protein, 58 aa, Artificial sequence
  protein pattern
  Variant (5)..(5): Xaa in position 5 is Phe, Trp or Tyr
  Variant (11)..(11): Xaa in position 11 is Ala or Val
  Variant (13)..(13): Xaa in position 13 is Ile or Val
  Variant (14)..(14): Xaa in position 14 is Glu or Gln
  Variant (15)..(16): Xaa in position 15 to 16 is any amino acid
  Variant (18)..(18): Xaa in position 18 is any amino acid
  Variant (19)..(19): Xaa in position 19 is Asp, Ser or Thr
  Variant (20)..(20): Xaa in position 20 is Ile or Val
  Variant (21)..(21): Xaa in position 21 is Ile, Leu or Met
  Variant (22)..(22): Xaa in position 22 is Glu or Gln
  Variant (23)..(23): Xaa in position 23 is Asp or Glu
  Variant (26)..(27): Xaa in position 26 to 27 is any amino acid
  Variant (28)..(28): Xaa in position 28 is Asp, Gly or Asn
  Variant (29)..(29): Xaa in position 29 is any amino acid
  Variant (31)..(31): Xaa in position 31 is Ile or Val
  Variant (32)..(32): Xaa in position 32 is Ile or Met
  Variant (37)..(37): Xaa in position 37 is Trp or Tyr
  Variant (42)..(42): Xaa in position 42 is any amino acid
  Variant (43)..(43): Xaa in position 43 is Phe or Trp
  Variant (45)..(45): Xaa in position 45 is Gly or Asn
  Variant (46)..(46): Xaa in position 46 is Gly, Asn, Ser or Thr
  Variant (47)..(47): Xaa in position 47 is any amino acid
  Variant (49)..(49): Xaa in position 49 is Ala or Pro
  Variant (56)..(56): Xaa in position 56 is any amino acid
PYHSXVYWRDXDXXXXPXXXXXXLMXXXXDXXVPNVXRPLPXXLXXXQXYDLNSWXES

SEQ ID NO: 3988 - protein, 60 aa, Artificial sequence
  protein pattern
  Variant (2)..(3): Xaa in position 2 to 3 is any amino acid
  Variant (9)..(9): Xaa in position 9 is Ala, Ser or Thr
  Variant (10)..(10): Xaa in position 10 is Lys or Arg
  Variant (12)..(12): Xaa in position 12 is any amino acid
  Variant (13)..(13): Xaa in position 13 is Ile, Leu or Val
  Variant (16)..(16): Xaa in position 16 is any amino acid
  Variant (18)..(19): Xaa in position 18 to 19 is any amino acid
  Variant (21)..(21): Xaa in position 21 is Pro or Ser
  Variant (24)..(24): Xaa in position 24 is Ser or Thr
  Variant (26)..(27): Xaa in position 26 to 27 is any amino acid
  Variant (33)..(33): Xaa in position 33 is Ala or Gly
  Variant (36)..(36): Xaa in position 36 is Lys or Arg
  Variant (37)..(37): Xaa in position 37 is Leu or Met
  Variant (38)..(38): Xaa in position 38 is Ala, Cys or Ser
  Variant (39)..(39): Xaa in position 39 is Lys or Arg
  Variant (40)..(40): Xaa in position 40 is any amino acid
  Variant (41)..(41): Xaa in position 41 is Met or Val
  Variant (42)..(42): Xaa in position 42 is Asp, Gly, Asn or Gln
  Variant (43)..(44): Xaa in position 43 to 44 is any amino acid
  Variant (46)..(46): Xaa in position 46 is Gly, Ile or Val
  Variant (49)..(49): Xaa in position 49 is any amino acid
  Variant (52)..(52): Xaa in position 52 is Thr or Val
  Variant (53)..(53): Xaa in position 53 is Ile or Leu
  Variant (56)..(56): Xaa in position 56 is Ile or Leu
GXXGVSILXXAXXFRXGXXFXAFXFXXHAETEXFGXXXXXXXXXVXGLXHYXXWHXYEPS

SEQ ID NO: 3989 - protein, 43 aa, Artificial sequence
  protein pattern
  Variant (2)..(3): Xaa in position 2 to 3 is any amino acid
  Variant (8)..(8): Xaa in position 8 is Ala or Gln
  Variant (9)..(9): Xaa in position 9 is any amino acid
  Variant (10)..(10): Xaa in position 10 is Phe, Ile or Val
  Variant (11)..(11): Xaa in position 11 is Gly or Asn
  Variant (13)..(13): Xaa in position 13 is Asp, Glu, Gly or Ser
  Variant (14)..(14): Xaa in position 14 is Phe or Val
  Variant (15)..(15): Xaa in position 15 is Glu or Ser
  Variant (16)..(16): Xaa in position 16 is Asp or Ser
  Variant (19)..(19): Xaa in position 19 is Ala or Gly
  Variant (20)..(20): Xaa in position 20 is Phe or Val
  Variant (21)..(21): Xaa in position 21 is any amino acid
  Variant (22)..(22): Xaa in position 22 is Ala or Val
  Variant (24)..(24): Xaa in position 24 is Ala or Gly
  Variant (25)..(25): Xaa in position 25 is any amino acid
  Variant (31)..(32): Xaa in position 31 to 32 is any or no amino acid
  Variant (35)..(36): Xaa in position 35 to 36 is any or no amino acid
  Variant (40)..(40): Xaa in position 40 is any amino acid
  Variant (41)..(41): Xaa in position 41 is Ala, Ser or Thr
  Variant (42)..(42): Xaa in position 42 is Ala, Asn or Val
IXXKDFGXXXXQXXXXRHXXXXQXXRRKLMXXARXXNWLXXXA

SEQ ID NO: 3990 - protein, 57 aa, Artificial sequence
  protein pattern
  Variant (2)..(3): Xaa in position 2 to 3 is any amino acid
  Variant (4)..(4): Xaa in position 4 is Asp, Glu, Asn or Arg
  Variant (6)..(9): Xaa in position 6 to 9 is any amino acid
  Variant (10)..(10): Xaa in position 10 is Asp or Glu
  Variant (11)..(11): Xaa in position 11 is any amino acid
  Variant (12)..(12): Xaa in position 12 is Ile, Leu or Val
  Variant (13)..(13): Xaa in position 13 is Leu or Val
  Variant (14)..(14): Xaa in position 14 is Phe, Leu, Met or Val
  Variant (15)..(15): Xaa in position 15 is any amino acid
  Variant (16)..(16): Xaa in position 16 is Ile, Met or Val
  Variant (20)..(20): Xaa in position 20 is Asp or Asn
  Variant (22)..(22): Xaa in position 22 is Ala, Glu or Ser
  Variant (23)..(24): Xaa in position 23 to 24 is any amino acid
  Variant (26)..(26): Xaa in position 26 is any amino acid
  Variant (27)..(27): Xaa in position 27 is any or no amino acid
  Variant (29)..(29): Xaa in position 29 is any or no amino acid
  Variant (31)..(36): Xaa in position 31 to 36 is any amino acid
  Variant (37)..(37): Xaa in position 37 is any or no amino acid
  Variant (40)..(40): Xaa in position 40 is Asp or Pro
  Variant (42)..(42): Xaa in position 42 is any amino acid
  Variant (46)..(46): Xaa in position 46 is Ile or Leu
  Variant (47)..(47): Xaa in position 47 is Ala or Ser
  Variant (53)..(53): Xaa in position 53 is Cys or Ser
  Variant (54)..(54): Xaa in position 54 is any amino acid
  Variant (55)..(55): Xaa in position 55 is Asp, Glu or Pro
  Variant (56)..(56): Xaa in position 56 is any amino acid
  Variant (57)..(57): Xaa in position 57 is Asp, Gly or Thr
GXXXGXXXXXXXXXXXPLRXAXXXLXXMXFXXXXXXXTYXHXLIDXXFLVSDXXXXX

SEQ ID NO: 3991 - protein, 38 aa, Artificial sequence
  protein pattern
  Variant (2)..(2): Xaa in position 2 is any amino acid
  Variant (5)..(5): Xaa in position 5 is Ala, Asp or Ser
  Variant (6)..(6): Xaa in position 6 is Cys or Val
  Variant (12)..(12): Xaa in position 12 is Ala, Pro or Val
  Variant (15)..(15): Xaa in position 15 is any amino acid
  Variant (19)..(19): Xaa in position 19 is Ala, Pro, Thr or Val
  Variant (22)..(22): Xaa in position 22 is Ala or Gly
  Variant (24)..(24): Xaa in position 24 is Ile, Leu or Met
  Variant (26)..(26): Xaa in position 26 is Asp or Lys
  Variant (27)..(27): Xaa in position 27 is Ala, Asp or Pro
  Variant (28)..(28): Xaa in position 28 is any amino acid
  Variant (30)..(30): Xaa in position 30 is Asp or Asn
  Variant (31)..(34): Xaa in position 31 to 34 is any amino acid
  Variant (35)..(35): Xaa in position 35 is Ile, Leu, Met or Val
  Variant (36)..(36): Xaa in position 36 is any amino acid
  Variant (37)..(37): Xaa in position 37 is Ile or Leu
LXEDXXIVEGYXEYXTWRXHLXYXRXXXGXXXXXXXXD

SEQ ID NO: 3992 - DNA, 2880 bp, Saccharomyces cerevisiae
  CDS (1)..(2880)
atgaagcatttctttaggctaccgacagcattccggcccatttctagggtttccttacgatattctagtactgataccgctcaaccaaaaatatcaaaactcaaaattagttttaataaaatttctgaatcaaatagcgaaaaaaaagataatttgggttcaattgacacacgaaattgtctttcgactcagcaagatgacaaactatcaagcactgagccctcgaaggcttcccttccaccatcattacaatatgttcgtgacttgatggatttgtataaggatcatgtggttttaacacaaatggggtcattttatgaactttactttgaacaagcaattagatacgctccagaattaaatatatcattgacgaatcgagcttatagtcatggcaaagttccatttgctgggtttcctgtacaccagttaagtcgacatttaaaaatgcttgttaacaattgcggatacagtgtaactatcgcagagcaattcaaaaaaaaggacgtggcagataatgaagccaataaattctataggagagtgactagaatcgttactcccggcacttttattgatgaagcatttgaaaatttgagggaaaatacatatctcctgaacatcgaatttcctgaaaactgtatgagtcaagtggcagacacgagtctaaaagttggtatatgttggtgtgatgtgagtactggggagatatttgttcaacaagtgtatcttagagatttggtttctgcaataacaagaattcaacctaaggagattttattagatgaaagattacttgagtttcatatcgagtcagggacgtggtatcctgaacttgttgagcttaaaaaattttttataaaatatcagaaaatgcccagtcaacatcgcactattgaatcattctatgggctgtttaatttgggaggtaaagaagcaacggaaaggcaattgaaaatccaatttcaaacttttactcagaaggagttagctgctttgaggaatacattaatatacgtaagtaatcatctacctgatttctctattaattttcagattcctcagagacaattagcaacggcgataatgcaaattgattcaagaaccagcactgcacttgaattgcattctactgtaagagacaacaataaaaaaggctctctgttatcatctataagaaggacagttacaccttcaggaacaagacttctgtctcaatggttgagtggaccttcccttgatttgaaagaaattaaaaagcgtcagaaaattgtagcatttttcaaagacaaccgtgatatcactgaaacactacggactatgttgaaaaaagtaaatgatctatcccgtatacttcaaaagtttagtttcggaaggggcgaggcattagaacttattcaaatggcacgttcactagaggtttcaagagaaataagaaaatatttactaaataacacgtcgttgatgaaagctacattaaagagtcaaatcacacagctgactgagtctttaaattttgaaaaaaatttgattgatgatattttgaagtttttaaatgaggaagagctagcaaagtcacaagatgctaaacagaatgcagatgtaactagaatgcttgacatagatgtaaaagacaagaaagaaagtaacaaagatgagatttttgaattaagagattttatcgtaaacccttcgttcaataccaaacttaggaaattgcatgacacttatcagggcgtttggcaaaaaaaaactgagtacaatgctttattaaaaggtttttttgttggcgacctaggtgctaagactttcaccttgaaggaaaggcaaaacggtgagtatgccctccatgtgacaggaacagcctctagtttaaagaaaattgatgagttaattagtaaatcgacggagtaccacggaagttgcttccatattttgcaaaaatcaagccaaacacgatggttgagtcacaaaatttggacagacttggggcacgagttggaattattaaatttaaagattaggaatgaagaggctaatattattgatctttttaaaaggaaatttattgatagaagtaacgaggtcagacaagttgcaactacactgggctatcttgataccttatcgtcctttgctgtgttagctaacgagagaaatttagtctgcccaaaagtggatgagagcaataaactagaagtagtgaatgggagacatctaatggttgaagagggtctttccgcgcgctctttggagacattcacggccaataactgcgaattggcgaaggacaatttatgggtaattaccggaccgaatatgggtggtaaatctacattcttaagacagaatgcaattatagtcattctggcgcaaattggatgttttgttccatgcagtaaggcgcgtgtgggtattgtagataagctttttagccgagttggttcagcagatgatctgtacaatgagatgagtacgttcatggttgagatgatagaaacatcgttcatcttgcaaggagctacggaacggtctttagctattctagatgagattggccgtgggactagtggtaaagaaggcattagcatcgcttatgcaactttaaagtatttgttagagaacaatcaatgcagaacgctttttgctacacattttggtcaagaactgaagcaaatcattgataacaaatgttcgaaaggaatgagcgaaaaggtcaagttttaccaaagcggaatcactgatttaggtggaaacaatttttgttacaaccataagttgaagccgggcatctgcacgaaatcagatgccattagagttgcggaattggccggatttccaatggaagcgttaaaagaagcccgcgaaatattgggataa

SEQ ID NO: 3993 - protein, 959 aa, Saccharomyces cerevisiae
MKHFFRLPTAFRPISRVSLRYSSTDTAQPKISKLKISFNKISESNSEKKDNLGSIDTRNCLSTQQDDKLSSTEPSKASLPPSLQYVRDLMDLYKDHVVLTQMGSFYELYFEQAIRYAPELNISLTNRAYSHGKVPFAGFPVHQLSRHLKMLVNNCGYSVTIAEQFKKKDVADNEANKFYRRVTRIVTPGTFIDEAFENLRENTYLLNIEFPENCMSQVADTSLKVGICWCDVSTGEIFVQQVYLRDLVSAITRIQPKEILLDERLLEFHIESGTWYPELVELKKFFIKYQKMPSQHRTIESFYGLFNLGGKEATERQLKIQFQTFTQKELAALRNTLIYVSNHLPDFSINFQIPQRQLATAIMQIDSRTSTALELHSTVRDNNKKGSLLSSIRRTVTPSGTRLLSQWLSGPSLDLKEIKKRQKIVAFFKDNRDITETLRTMLKKVNDLSRILQKFSFGRGEALELIQMARSLEVSREIRKYLLNNTSLMKATLKSQITQLTESLNFEKNLIDDILKFLNEEELAKSQDAKQNADVTRMLDIDVKDKKESNKDEIFELRDFIVNPSFNTKLRKLHDTYQGVWQKKTEYNALLKGFFVGDLGAKTFTLKERQNGEYALHVTGTASSLKKIDELISKSTEYHGSCFHILQKSSQTRWLSHKIWTDLGHELELLNLKIRNEEANIIDLFKRKFIDRSNEVRQVATTLGYLDTLSSFAVLANERNLVCPKVDESNKLEVVNGRHLMVEEGLSARSLETFTANNCELAKDNLWVITGPNMGGKSTFLRQNAIIVILAQIGCFVPCSKARVGIVDKLFSRVGSADDLYNEMSTFMVEMIETSFILQGATERSLAILDEIGRGTSGKEGISIAYATLKYLLENNQCRTLFATHFGQELKQIIDNKCSKGMSEKVKFYQSGITDLGGNNFCYNHKLKPGICTKSDAIRVAELAGFPMEALKEAREILG

SEQ ID NO: 3994 - DNA, 4410 bp, Saccharomyces cerevisiae
  CDS (425)..(3304)
atgtatctatgcactgcgtgatatcgcggcaagcgaagagttgacatatgattacaaatttgagagagaaaaggatgacgaggaaagacttccttgtttatgtggagcacctaattgtaaaggtttcttgaactgacgatgatacattgatttgtttggagcttcctgatttaacatatcgttgctttccagcaaaaggtaaagataaatactaaactgtatacatctataagtaatctcggccattattttaacgattagtacttttgttcgtgtcatttttttggaaaattttgcgatctctcactgttgaagaataaagatttcgcgatgacttttgcttgcagagaaatgcctgaaaacacgaacattcaataatatagatggtacataacatatgcgcaagaaaacgtaaaggccacggatgaagcatttctttaggctaccgacagcattccggcccatttctagggtttccttacgatattctagtactgataccgctcaaccaaaaatatcaaaactcaaaattagttttaataaaatttctgaatcaaatagcgaaaaaaaagataatttgggttcaattgacacacgaaattgtctttcgactcagcaagatgacaaactatcaagcactgagccctcgaaggcttcccttccaccatcattacaatatgttcgtgacttgatggatttgtataaggatcatgtggttttaacacaaatggggtcattttatgaactttactttgaacaagcaattagatacgctccagaattaaatatatcattgacgaatcgagcttatagtcatggcaaagttccatttgctgggtttcctgtacaccagttaagtcgacatttaaaaatgcttgttaacaattgcggatacagtgtaactatcgcagagcaattcaaaaaaaaggacgtggcagataatgaagccaataaattctataggagagtgactagaatcgttactcccggcacttttattgatgaagcatttgaaaatttgagggaaaatacatatctcctgaacatcgaatttcctgaaaactgtatgagtcaagtggcagacacgagtctaaaagttggtatatgttggtgtgatgtgagtactggggagatatttgttcaacaagtgtatcttagagatttggtttctgcaataacaagaattcaacctaaggagattttattagatgaaagattacttgagtttcatatcgagtcagggacgtggtatcctgaacttgttgagcttaaaaaattttttataaaatatcagaaaatgcccagtcaacatcgcactattgaatcattctatgggctgtttaatttgggaggtaaagaagcaacggaaaggcaattgaaaatccaatttcaaacttttactcagaaggagttagctgctttgaggaatacattaatatacgtaagtaatcatctacctgatttctctattaattttcagattcctcagagacaattagcaacggcgataatgcaaattgattcaagaaccagcactgcacttgaattgcattctactgtaagagacaacaataaaaaaggctctctgttatcatctataagaaggacagttacaccttcaggaacaagacttctgtctcaatggttgagtggaccttcccttgatttgaaagaaattaaaaagcgtcagaaaattgtagcatttttcaaagacaaccgtgatatcactgaaaacctacggactatgttgaaaaaagtaaatgatctatcccgtatacttcaaaagtttagtttcggaaggggcgaggcattagaacttattcaaatggcacgttcactagaggtttcaagagaaataagaaaatatttactaaataacacgtcgttgatgaaagctacattaaagagtcaaatcacacagctgactgagtctttaaattttgaaaaaaatttgattgatgatattttgaagtttttaaatgaggaagagctagcaaagtcacaagatgctaaacagaatgcagatgtaactagaatgcttgacatagatgtaaaagacaagaaagaaagtaacaaagatgagatttttgaattaagagattttatcgtaaacccttcgttcaataccaaacttaggaaattgcatgacacttatcagggcgtttggcaaaaaaaaactgagtacaatgctttattaaaaggtttttttgttggcgacctaggtgctaagactttcaccttgaaggaaaggcaaaacggtgagtatgccctccatgtgacaggaacagcctctagtttaaagaaaattgatgagttaattagtaaatcgacggagtaccacggaagttgcttccatattttgcaaaaatcaagccaaacacgatggttgagtcacaaaatttggacagacttggggcacgagttggaattattaaatttaaagattaggaatgaagaggctaatattattgatctttttaaaaggaaatttattgatagaagtaacgtggtcagacaagttgcaactacactgggctatcttgataccttatcgtcctttgctgtgttagctaacgagagaaatttagtctgcccaaaagtggatgagagcaataaactagaagtagtgaatgggagacatctaatggttgaagagggtctttccgcgcgctctttggagacattcacggccaataactgcgaattggcgaaggacaatttatgggtaattaccggtccgaatatgggtggtaaatctacattcttaagacagaatgcaattatagtcattctggcgcaaattggatgttttgttccatgcagtaaggcgcgtgtgggtattgtagataagctttttagccgagttggttcagcagatgatctgtacaatgagatgagtacgttcatggttgagatgatagaaacgtcgttcatcttgcaaggagctacggaacggtctttagctattctagatgagattggccgagggactagtggtaaagaaggcattagcatcgcttatgcaactttaaagtatttgttagagaacaatcaatgcagaacgctttttgctacacattttggtcaagaactgaagcaaatcattgataacaaatgttcgaaaggaatgagcgaaaaggtcaagttttaccaaagcggaatcactgatttaggtggaaacaatttttgttacaaccataagttgaagccgggcatctgcacgaaatcagatgccattagagttgcggaattggccggatttccaatggaagcgttaaaagaagcccgcgaaatattgggataacttttgaatacaactattaattgtatataatttgacatgtaatataataagatgtggaatcaatttccctgtcttttttttcaaaagcgactgtgaagatacttagaaaatggcaaaaacggtagtttgcaaatttccgtagtttgtcgcgcgaatgatattagcggaaacaaaacgatcaaaccttataccatgaatataatggtggatatttattacggtaaggaaacactctgagccaggcttgtaaatagcggttatctaagcttgtaactaaagaaatcaatttgcatctttcgtccatgagtgtcagccttgagcaaacgctcggattcagaataaaagttacgcacgtgttggatgtagttactgaaggaagattgtattcgttcaattcatccaacaacactcttactatccaaacaacaaagaagaatcaatctccacaaaacttcaaggtgataaaatgtacattcatcaagcatttggaagtcattggtgataagccctcgtttaactcattcaaaaagcaacaaatcaaaccctcatatgtcaacgtggaaagagttgagaagcttttgaaagaaagtgtaatagcatctaaaagaaagaactcttaagggcaagggtgtgagtgcagagggtcagttcattttcgatcaaatcttcaagaccataggagatactaagtgggtggctaaagacatcattattcttgatgacgttaaggtgcaacctccatacaaggtcgaagatatcaaagtgctacatgagggaagtaaccaatccattacattaattcaaagaatagtggaaagaagctgggagcagctagaacaagacgatggtaggaaaggcggatagattaattaatgacggaaacgataatatacgttatatatttttatccgtacttctataatgtcaactattgtttataaagagatccatttgagtctacagatttttctatttatcaaactataatattccaccactctcttctcagtcgcaatgcttgggtgtacggtgtttgaataattgaattagatttaaagcgaataagtgatgactaacaagcaaaaaaatcgagtatttcaagatcc

SEQ ID NO: 3995 - protein, 959 aa, Saccharomyces cerevisiae
MKHFFRLPTAFRPISRVSLRYSSTDTAQPKISKLKISFNKISESNSEKKDNLGSIDTRNCLSTQQDDKLSSTEPSKASLPPSLQYVRDLMDLYKDHVVLTQMGSFYELYFEQAIRYAPELNISLTNRAYSHGKVPFAGFPVHQLSRHLKMLVNNCGYSVTIAEQFKKKDVADNEANKFYRRVTRIVTPGTFIDEAFENLRENTYLLNIEFPENCMSQVADTSLKVGICWCDVSTGEIFVQQVYLRDLVSAITRIQPKEILLDERLLEFHIESGTWYPELVELKKFFIKYQKMPSQHRTIESFYGLFNLGGKEATERQLKIQFQTFTQKELAALRNTLIYVSNHLPDFSINFQIPQRQLATAIMQIDSRTSTALELHSTVRDNNKKGSLLSSIRRTVTPSGTRLLSQWLSGPSLDLKEIKKRQKIVAFFKDNRDITENLRTMLKKVNDLSRILQKFSFGRGEALELIQMARSLEVSREIRKYLLNNTSLMKATLKSQITQLTESLNFEKNLIDDILKFLNEEELAKSQDAKQNADVTRMLDIDVKDKKESNKDEIFELRDFIVNPSFNTKLRKLHDTYQGVWQKKTEYNALLKGFFVGDLGAKTFTLKERQNGEYALHVTGTASSLKKIDELISKSTEYHGSCFHILQKSSQTRWLSHKIWTDLGHELELLNLKIRNEEANIIDLFKRKFIDRSNVVRQVATTLGYLDTLSSFAVLANERNLVCPKVDESNKLEVVNGRHLMVEEGLSARSLETFTANNCELAKDNLWVITGPNMGGKSTFLRQNAIIVILAQIGCFVPCSKARVGIVDKLFSRVGSADDLYNEMSTFMVEMIETSFILQGATERSLAILDEIGRGTSGKEGISIAYATLKYLLENNQCRTLFATHFGQELKQIIDNKCSKGMSEKVKFYQSGITDLGGNNFCYNHKLKPGICTKSDAIRVAELAGFPMEALKEAREILG

SEQ ID NO: 3996 - DNA, 2652 bp, Agrobacterium tumefaciens str. C58
  CDS (1)..(2652): transl_table=11
atgatggagcaatatatcgagatcaaggcgaacaatcccggttcgctgctgttttaccgcatgggcgatttttacgaattgttctttgacgatgcggtcgaagcctcccgcgcgctcggtatcacgctgacgaaacgcggccagcatatggggcacgatattcccatgtgcggcgttcccgttcacgctgccgatgactatctccagaagctcatcctgcgcggctaccgtgtcgccgtctgcgaacagattgaagacccggctgaagcgaagaagcgcggatcgaaatccgtggtcaagcgtgatgtggtgcggctcgtcacgcccggaacgctcactgaagaaaagctgctgtcgccgacggaatccaactatctgatggcgcttgcccgtattcgcggcagtgcggaggcgcagttcgcgctggcctggatcgatatttccaccggcgtcttccgtctggcggaaaccacgctgacgcggcttctcgccgatatctggcgtatcgatccgcgtgagctgatcgttgccgacagcctgttccacgacgaggaactacggccggttttcgatgtgctgggccgtgtcgcggtgccgcagccggccatcctcttcgacagtgcggtggcagaaggccgtattgcgcgttatttcaacgtctcgacgctggatggtttcggaacgttttcacgggtggaaatggcagccgcagcagcagccgtggcctatgtcgaaaagacccagattgccgagcgtccgccgctcggcgcgccggaacgcgaaagtgcggcatcgacgctcttcattgatcccgccacccgcgccaatctggaactggtgaaaacactatccggcgaccgggatggatcgctcctgcacgcgcttaaccgcactgtcactggcggcggtgcgcgacttctggccgaacgactgatgtcgccattgaccgatccggaaaggatcaatgcccgtcttgatgccgtggcctatctcatcgatgacgtctccctgtgcgatggtctgcgtgacgcgctgaaacatgtcgcggatatgcctcgtgcgctttcccgccttgcgctggaacgtggcggcccgcgcgatcttggcgccatccggcagggtctggtttcggccgaaaaaattgcggtcattctcgacggtgggctgctgccggatgagctggcgaaagctctcagggatttgaaagccctgcccggcgctcttgaagccatgctcggctcgatgctggccgacgatctgccgcttctgaaacgcgatggtggtttcctgcgtgagggcgccaatcccgaactcgacgaagttcgcgcactgcgcgaccagtcacgccgggtgatcgccgggttgcagctgcaatatgccgatgagaccggcatcaagtcgctcaagatcaagcataacaacgtgctgggttattttatcgaggtgacggcgggcaatgccgatgtgatgatggcaacggatgaggccaaagcgcgctttatccatcggcagaccatggcgggcgccatgcgcttcacaaccacggagcttgccgatctcgaaagccgcatcgccaatgccgcggccgaggctctgaccatggagctggaagccttcgagcgcatggtcgaggccgtggtgcagcaggcggaggcgatcaaggccggggctctggcgcttgcggtgatcgatgtcgcctcaagcctcgcctatcttgcgaccgaacaggcctattgccgtccgatcgtcgatgcctccatgaccttttcaatcaagggcggccggcacccggttgttgagcaagcgctgcggcggcagtctgccgggccgttcattgcgaataattgcgatctctccgccgtcaatggtggcaagaacggtgcaatctggctgctcaccggcccgaacatgggcggtaaatcgaccttcctgcgccagaatgcgctgatcgccatcctcgcgcagatcggttccttcgttccggcggaggctgcccatatcggcgtcgtagaccggctgttttcgcgcgtcggcgcctccgacgatctggcccgtggacgctcgaccttcatggtggagatggtcgaaaccgccgccattctcaatcaggcgacggatcgctcgctggtgatcctcgacgagatcggccgtggcaccgcaacttttgacgggctttcgatcgcctgggcggccgtcgagcatctgcatgaggtcaatcgttgtcgcggcctcttcgccacgcacttccacgaactgacggtactgtcggaaaaactcggccgcctttccaatgccacgatgcgggtgaaggagtgggaaggtgatgtcatcttcctgcatgaggtcgggccgggcgctgcggatcgttcctatggtattcaggtcgcgcgacttgcgggcctgcctgcctcagtggtggagcgtgcccgtgaggtgctgacgaagctcgaggatgccgaccgcaagaacccggccagccagctgatcgacgatctgccgctgttccagattgccgtccgccgcgaggaaacccgcaaggcggggccatcgaaagtggaggaggccctgaagagcttcaacccggacgaaatgacgccgcgtgaggcattggacgcgctctatgcgttgaagaaagaacttggcaaggcttga

SEQ ID NO: 3997 - protein, 883 aa, Agrobacterium tumefaciens str. C58
MMEQYIEIKANNPGSLLFYRMGDFYELFFDDAVEASRALGITLTKRGQHMGHDIPMCGVPVHAADDYLQKLILRGYRVAVCEQIEDPAEAKKRGSKSVVKRDVVRLVTPGTLTEEKLLSPTESNYLMALARIRGSAEAQFALAWIDISTGVFRLAETTLTRLLADIWRIDPRELIVADSLFHDEELRPVFDVLGRVAVPQPAILFDSAVAEGRIARYFNVSTLDGFGTFSRVEMAAAAAAVAYVEKTQIAERPPLGAPERESAASTLFIDPATRANLELVKTLSGDRDGSLLHALNRTVTGGGARLLAERLMSPLTDPERINARLDAVAYLIDDVSLCDGLRDALKHVADMPRALSRLALERGGPRDLGAIRQGLVSAEKIAVILDGGLLPDELAKALRDLKALPGALEAMLGSMLADDLPLLKRDGGFLREGANPELDEVRALRDQSRRVIAGLQLQYADETGIKSLKIKHNNVLGYFIEVTAGNADVMMATDEAKARFIHRQTMAGAMRFTTTELADLESRIANAAAEALTMELEAFERMVEAVVQQAEAIKAGALALAVIDVASSLAYLATEQAYCRPIVDASMTFSIKGGRHPVVEQALRRQSAGPFIANNCDLSAVNGGKNGAIWLLTGPNMGGKSTFLRQNALIAILAQIGSFVPAEAAHIGVVDRLFSRVGASDDLARGRSTFMVEMVETAAILNQATDRSLVILDEIGRGTATFDGLSIAWAAVEHLHEVNRCRGLFATHFHELTVLSEKLGRLSNATMRVKEWEGDVIFLHEVGPGAADRSYGIQVARLAGLPASVVERAREVLTKLEDADRKNPASQLIDDLPLFQIAVRREETRKAGPSKVEEALKSFNPDEMTPREALDALYALKKELGKA

SEQ ID NO: 3998 - DNA, 2748 bp, Brucella melitensis 16M
  CDS (1)..(2748): transl_table=11
atgaaggtttgtgacatggaagcgaaggttgaagagaaagagccggaaccggtggaaaacgccgggccggatgctccggttcgcctgacgcccatgatggagcaatatatcgagatcaaggcggcgaatgttgattcgctcctgttctatcgcatgggcgatttctacgaattgttcttcgatgatgccgtggcggcttccgctgcgcttggcatcacgcttacaaagcgcggcaagcatctgggtgaggatattccgatgtgcggcgtgccggttcatgccgccgacgattatctgcaaaagctgattgccaaaggctaccgcgtcgcggtctgcgaacaggtggaagacccggcagaagccaagaaacgcggctccaaatcggtggtgaagcgcgatgtgatccgtcttgttacgcccggaacgctgacggaagaaaaactgcttgacccggcacaagccaatttcctgatggccatggggcgcacgcgcggcgacggtgcgctggcgctcgcctggatcgatatctcaaccggaaccttccgggtggcggaaaccacgccagaccggctctttgccgacattatgcgcgtggacccgcgtgaactggtcgtggccgacagcgcctttcatgatgaggaattgcggcccgttttcgatctgatcggcaaggcggtgacgccacagccggcaacgctttttgacagtgcggcggcgcaaacgcgcatccagcactatttcaacgtggcgacactcgatggtttcggccagttcagccgcccggagctctctgccatttccggcgcaatcgcctatattgaaaagacgcagatttccgaacgcccacccctgatgcgccctgagcgcgaacatgagggcggcacgcttttcatcgacccggccacacgcgccagcctggaattggcccgcaccatgtcgggcaatcgcgatgggagcctcctgaaagccatcgaccgcacggtgacgggcggtggcgcgcggctccttgccgaacggttgactgcgccgctgactagcccgaaggaaatagcactgcggcttgattccgtttcgtggtgcctgagcgagcagacgttgtgcgaggctctgcggctggaactgaagggcgtgcccgatatgccgcgcgccctgtcgcggttggccgtcgggcgtggcggcccgcgcgatctgggtgcactggcctgcggctttgaagcggcgggcggcatcgcctcgcttctggatggcgcgctattgccggacgaacttgcggcggcgcgcgaggccattgaaaaaatgcccgccggttttgctgctcatctcgaccgggcgctggccgatgaattgccgctcctcaaacgcgacggcggtttcgtgcgcgaaggctataattcggaactggatgaaatgcgcgcgctgcgcgaccagtcacgccgcgtcattgccggtttgcaggccgattatatcgaggaaaccggcatcaagtcgctcaagatcaagcacaataatgtgcttggttatttcatcgaggtcacggccaataattcgggagcgatgaccgatacggacgaggcgaaaagccggttcatccatcgccagaccatggccaatgccatgcgttttaccacgaccgaactggcggaactggaaagcaagattgccaatgccgccgaccgggcgctctccattgaacttgcgattttcgaggaactgacggctgaagctgttgcccatgcggacagtatccgcgctgcggcttcagcgctttccgtcttcgatgtttcaactgcgcttgccgtactggcggaagagcagggctattgccgcccacatgttgatgacagcctctccttcaacatcgtggctggccgtcatccggtcgtcgagcaggcgctgcggcgtcaggcggccaatccgtttgttgccaatgattgcgatctctcgccgcaaagggacggtggagatggtgcgatctggcttttgaccggccccaatatggggggtaaatcgaccttcctgcgccagaacgcgctgatcgctattcttgcgcagatgggttccttcgtgccagccggatcggcacatatcggcgtggtggaccggctgttcagccgcgtcggtgcttccgacgatctggcgcgggggcgttcgaccttcatggtcgaaatggttgaaacggcggcaattctcaatcaggcgggcgaacactcgctggtgatcctggatgagatcgggcgcggcacggccactttcgatgggctttccattgcctgggcggcggtggaatatctgcacgagaaaaaccgctgccgtgcgctgtttgccacgcatttccacgaaatgacggctctttcggagaagctggagcggctttccaatgtcaccatgcgggtgaaggaatgggacaatgacgtcatcttcctgcatgaggtggcaaaaggagcagccgaccgttcctatggcgtgcaggtggcccgcctcgcggggttgccggaagccgtggtgaaccgtgcacgcgacgtgctgcatcaactagaggcgggcgaaacatccggcaaggccgacaggctgatcgacgacctgccgcttttttccgtcatgttgcagcaggaaaagccgaagccgcagatacaggcgaaagacagcgaactggcgaatgcggtcgctgccatcagccctgatgaactgaccccacgggaagcactggacctgatctataagctgaaggaactggccgggaaggcgtga

SEQ ID NO: 3999 - protein, 915 aa, Brucella melitensis 16M
MKVCDMEAKVEEKEPEPVENAGPDAPVRLTPMMEQYIEIKAANVDSLLFYRMGDFYELFFDDAVAASAALGITLTKRGKHLGEDIPMCGVPVHAADDYLQKLIAKGYRVAVCEQVEDPAEAKKRGSKSVVKRDVIRLVTPGTLTEEKLLDPAQANFLMAMGRTRGDGALALAWIDISTGTFRVAETTPDRLFADIMRVDPRELVVADSAFHDEELRPVFDLIGKAVTPQPATLFDSAAAQTRIQHYFNVATLDGFGQFSRPELSAISGAIAYIEKTQISERPPLMRPEREHEGGTLFIDPATRASLELARTMSGNRDGSLLKAIDRTVTGGGARLLAERLTAPLTSPKEIALRLDSVSWCLSEQTLCEALRLELKGVPDMPRALSRLAVGRGGPRDLGALACGFEAAGGIASLLDGALLPDELAAAREAIEKMPAGFAAHLDRALADELPLLKRDGGFVREGYNSELDEMRALRDQSRRVIAGLQADYIEETGIKSLKIKHNNVLGYFIEVTANNSGAMTDTDEAKSRFIHRQTMANAMRFTTTELAELESKIANAADRALSIELAIFEELTAEAVAHADSIRAAASALSVFDVSTALAVLAEEQGYCRPHVDDSLSFNIVAGRHPVVEQALRRQAANPFVANDCDLSPQRDGGDGAIWLLTGPNMGGKSTFLRQNALIAILAQMGSFVPAGSAHIGVVDRLFSRVGASDDLARGRSTFMVEMVETAAILNQAGEHSLVILDEIGRGTATFDGLSIAWAAVEYLHEKNRCRALFATHFHEMTALSEKLERLSNVTMRVKEWDNDVIFLHEVAKGAADRSYGVQVARLAGLPEAVVNRARDVLHQLEAGETSGKADRLIDDLPLFSVMLQQEKPKPQIQAKDSELANAVAAISPDELTPREALDLIYKLKELAGKA

SEQ ID NO: 4000 - DNA, 3015 bp, Schizosaccharomyces pombe (fission yeast)
  CDS (1)..(3015)
atgagaggaatgagttataacattactcatgaatgcgacgctattaatattctatcagataatttacatgaaggagcaatatcagaagatatggttgccctcagtggtccagccatagagttactagaaaataatgttggtagttcaaaaaatagctatcaagaagatgagggaagttcttcgattgatgagaacgcgcctcttataagcataaaacgaaagaggagaattcgtacggttaaatctacttcaaataaagaattagtgcaaagaaaagcatcgaaacctactaaacagaaatctgttttcacaccacttgagcagcaatacttagaattgaagaaaaattatcaagaaactattttggcaattgaagtaggatataagttccgattttttgggaaggatgcaaaaatagcctctgaggtgttaggaattagttgctattttgagcacaattttttaaatgctagtgttccctcgtatcgtattgactatcacttggaaagactcattaattttggtctcaaagttgctgttgttcgacaaactgaaacagccgctctcaagtcaactagctctagcagaaacactctgtttgacagacgagttgctcgcgtgcttaccaaggggactactctagatgatagcttttttcgctttgagcaaacacagcatggtacactacaagcttcccaatttatcctatgtgttgcagataatgttgataagagcaaagcaaaatcaggaagagttcaggttggactaattgccatacaattatcatctggaactactgtttatgatcattttcaagatgattttttgagaagcgaattacaaacaagactttctcattttcaaccttgtgaattgatatattcgaacaagttatcttccgaatcggttgccctactgaatcattacgtatcaactgaaaaaacttgcggtagagtagtgcgtgtgcaacatgctgttcagcaggacgtgaaactagcattggagaatttgcaggacttcttttcttctaaatgcatcatgtccggtagcaaaattatagaattacacatggaaaaggtgaagtctttacattctctttcaatcatttgtttggacatggccatttcttatttgatggaattctcattggaagatctattcgttgcttcaaacttttatcaaccttttgatagcatttcttctatggttttaagtaaacaggctttggaaggtcttgagcttttcgttaatcaaacagatcatacacctgttggtagcctattttgggtgttagatcgcacatacacaagatttggacaaaggatgcttcagagatggcttcaaaagcctttggttgataaagaaaatataatcgagcgtctggacgcggttgaggaattagcctttaattctaatagtcaagttcaagcaattcgtaaaatgctgtatagattgcccgatctcgaaaagggtctgtccagaatctactatcaaaggtgcactccgtctgaaatgttccatgttttgaagggtttttataaagccgcatctgctttctcgaaaaattcatactcttgttttaagtcagcattgcttagaagactaattcaacagcttcctagcatatcgtctatcattgatcatttcttgggaatgtttgatcaaaaagaagctgaaaataacaacaaggttgacatgttcaaggatattgacaattttgatttatcagaagagccaaacgatgtagattatgagttggcacaggaaattcgagagctgaaaatgagtattttgatggtcagaactgaaatggattttcaccttcaagaattgagagactatttagaatatcctaatttggagttttctatttggggaaatgtcaaattctgcattgaagtttctaaaggatgtaaaaaaattccaccagattggatcaagttaagttctactcgatctcttttccggtttcatacaccaaaaattcaatctctcttgattgaattgtcttctcatgaagaaaacctaacaatttcaagtgaaaaaatttatcgctcatttctttctagaatatctgaacattacaatgaattgcgaaatgttacaacagtattggggacattggattgcttaatttcttttgcccggatttcttctcaatcgggttatacaaggccagaattttcagataaggagctgttaatacatgaatctcgacatccaatgattgaattgctaagtgataaatcttttgtacctaaccatattcatctaagttctgatggtgtcaggtgtttgttaattacgggcccaaatatgggcggaaaaagttcttttgttaaacaattagcacttagcgccattatggctcaaagtggttgctttgttccagcaaaaagtgctctgcttcctatttttgattcgattcttatcagaatgggatcatctgacaacctttctgtgaacatgtctacttttatggtagagatgctcgaaaccaaggaggttttaagcaaggctacagaaaaatcaatggtcattattgacgaattaggtcggggtactagtactattgatggagaagctatttcttatgcagtcttgcactatttaaatcaatatataaaatcttatttattgtttgtgacacattttcctagtttaggaatactagaaagaaggtttgaagggcaacttcgttgctttcacatgggttacttaaaatcaaaggaagactttgagactagcgtttcacagtctatatcatttctttacaaattggttcctggggttgcttcaaaaagttatgggttaaatgttgctagaatggcaggaattccgttttcaattttaagtcgtgcaaccgaaattagtgaaaattacgaaaagaagcatagaaatgcaaggaaaaatgttttcatacgaaaggttgcaaaactattaatgattcttaatgccgaagagattgattttaaaaggcttttctatgatcttaccgctttcgaagaaatctga

SEQ ID NO: 4001 - protein, 1004 aa, Schizosaccharomyces pombe (fission yeast)
MRGMSYNITHECDAINILSDNLHEGAISEDMVALSGPAIELLENNVGSSKNSYQEDEGSSSIDENAPLISIKRKRRIRTVKSTSNKELVQRKASKPTKQKSVFTPLEQQYLELKKNYQETILAIEVGYKFRFFGKDAKIASEVLGISCYFEHNFLNASVPSYRIDYHLERLINFGLKVAVVRQTETAALKSTSSSRNTLFDRRVARVLTKGTTLDDSFFRFEQTQHGTLQASQFILCVADNVDKSKAKSGRVQVGLIAIQLSSGTTVYDHFQDDFLRSELQTRLSHFQPCELIYSNKLSSESVALLNHYVSTEKTCGRVVRVQHAVQQDVKLALENLQDFFSSKCIMSGSKIIELHMEKVKSLHSLSIICLDMAISYLMEFSLEDLFVASNFYQPFDSISSMVLSKQALEGLELFVNQTDHTPVGSLFWVLDRTYTRFGQRMLQRWLQKPLVDKENIIERLDAVEELAFNSNSQVQAIRKMLYRLPDLEKGLSRIYYQRCTPSEMFHVLKGFYKAASAFSKNSYSCFKSALLRRLIQQLPSISSIIDHFLGMFDQKEAENNNKVDMFKDIDNFDLSEEPNDVDYELAQEIRELKMSILMVRTEMDFHLQELRDYLEYPNLEFSIWGNVKFCIEVSKGCKKIPPDWIKLSSTRSLFRFHTPKIQSLLIELSSHEENLTISSEKIYRSFLSRISEHYNELRNVTTVLGTLDCLISFARISSQSGYTRPEFSDKELLIHESRHPMIELLSDKSFVPNHIHLSSDGVRCLLITGPNMGGKSSFVKQLALSAIMAQSGCFVPAKSALLPIFDSILIRMGSSDNLSVNMSTFMVEMLETKEVLSKATEKSMVIIDELGRGTSTIDGEAISYAVLHYLNQYIKSYLLFVTHFPSLGILERRFEGQLRCFHMGYLKSKEDFETSVSQSISFLYKLVPGVASKSYGLNVARMAGIPFSILSRATEISENYEKKHRNARKNVFIRKVAKLLMILNAEEIDFKRLFYDLTAFEEI

SEQ ID NO: 4002 - DNA, 2463 bp, Wolbachia endosymbiont of Drosophila melanogaster
  CDS (1)..(2463): transl_table=11
atggagcagtatttgaacctgaaagctcaatacaaagatcatctgctattttataggctaggagatttttatgaattgtttttcgatgatgctattaaagctgcgaaattgctgaatatagtgctcactaagagaggtaattcgtgtgggcaagaaataccaatgtgtggagtgccagcacacagtagtgaatcttacctgcacaagctaatagatttaggattcaaagtagcaatctgtgatcaattagaaactgctgatgaagcaaaaaagaggggctataaatccatagtaaaacgtgatgtagtgcgagttgtaactccaggtacaattatagaagattcactactggaggataaaagcaataattatctcgcatccatagttgaacaaaatgacgaatatgctattagttggcttgaattatcgacgggaaaattttttcacactttaacgagtttgaaagctctagatagtgatttattgcgtatatcaccaagagaattattaatttctgaaaaattcactgaggatgaaaaaattagatcgattttaaaaaattataaaatatcaattacgcaacacgcacagagcttttttgagtatagtaaatctcacagaacattatgcgagttttataaaatcagggaacttgggagtataggaaatttcagcaaagtagaaatcatggcgtgtggtgcactgcttgaatatgtcagagtaacacaaaggggctctattccaaggcttgaattcccaaaaacctataagcaacaaaatttcatgcttattgatacttcagcaaggagaaatcttgagttgttttcaactcaatttggtgaaaagaaaggttcactaatttcagttattgatcatacagttacagcttctggtggacgcctgctcaaacaaatgctcgcttcaccccttgcttgctccaaggcaatcaatttgaggctcagcaccgctcaattttttgtaaataatcatgattcacgcagaaaaatacgagagatattatctaacattccggatattgaaaggtctttatcgcgcttaatactagggcgtggttcaccaaaggatatgaacctattgaaaataggcctaggaaagactttagaattgtctgagttcttatgtaaaattgaatcaggtgaaaatggatctctcccacaacaatatgtcatccaaactgagatccagccagcgtcacgcgctggaataacagtaaaatcagacgagagtgaactaagcacaatacataaaagccttggcaatcataaagacctatttgaactgttaaatagtgctatactcgataataacctcagttccgtgaaagaaggaggatttattcactcaaaatacaactcagaattatctgagttatcttatatattgaacaacagtaacaagttggtaactaagctccgtgaatcttatcgcgatcttactggcattgccgcactcaaaatattacacaacaacatacttggttattacgttgaagtgtcggcaaatcacaaaataacttcggatatatttattcataggcaaagcttagcaaatagcatgcgctacactactaatgaattgaaagaactagaaaataaaattcttacggcacgtgatgctgcaatcggcttagaaatgaaaatttttagtgaactgtgtagtgaagtcgctaaagaatctgaaaaaattgctcttgctgcaaatgctttggcaaaacttgatattagaaccgcatttgcagagcttgcagtgcaaaataattacgtaaaacccattattgatgacagcaaagagttcaatatctgtagcggaagacatccagtggttgaagttaacgataaattcattgcaaatagcatcaatctagctggtatacatctaattactggtcctaatatggctggaaaaagcactttcttgaggcaaaacgctctcattgcaattttagctcacatggggtcatttgtgccagcagagagtgcacatattggagtgattgacaagatattcagcagggttggcgcaacggataatataacagctggttattctaccttcatggtagagatgatcgaaacagcaacgatagtaaatcaggcaacggaccgttccttggtgatacttgatgaaattggtaggggcacaggggtgtatgatggattatctattgcacaggcggtgattgaacatattcacaatgtaaataagtgccgcgccatttttgcaactcattatcatgaattaactaaagtaagcaaatacttgaagaacgtgaaatgtttttgtgtaaaaataagagagtggaacggagaggttatttttctacatgaagtaattgaaggcattgcagatgagtcatatggaatacatgtagcaaaacttgctggttttcctgattctgttttaaatagagcaagtgaagtgtttgaggagctgaaggcttga

SEQ ID NO: 4003 - protein, 820 aa, Wolbachia endosymbiont of Drosophila melanogaster
MEQYLNLKAQYKDHLLFYRLGDFYELFFDDAIKAAKLLNIVLTKRGNSCGQEIPMCGVPAHSSESYLHKLIDLGFKVAICDQLETADEAKKRGYKSIVKRDVVRVVTPGTIIEDSLLEDKSNNYLASIVEQNDEYAISWLELSTGKFFHTLTSLKALDSDLLRISPRELLISEKFTEDEKIRSILKNYKISITQHAQSFFEYSKSHRTLCEFYKIRELGSIGNFSKVEIMACGALLEYVRVTQRGSIPRLEFPKTYKQQNFMLIDTSARRNLELFSTQFGEKKGSLISVIDHTVTASGGRLLKQMLASPLACSKAINLRLSTAQFFVNNHDSRRKIREILSNIPDIERSLSRLILGRGSPKDMNLLKIGLGKTLELSEFLCKIESGENGSLPQQYVIQTEIQPASRAGITVKSDESELSTIHKSLGNHKDLFELLNSAILDNNLSSVKEGGFIHSKYNSELSELSYILNNSNKLVTKLRESYRDLTGIAALKILHNNILGYYVEVSANHKITSDIFIHRQSLANSMRYTTNELKELENKILTARDAAIGLEMKIFSELCSEVAKESEKIALAANALAKLDIRTAFAELAVQNNYVKPIIDDSKEFNICSGRHPVVEVNDKFIANSINLAGIHLITGPNMAGKSTFLRQNALIAILAHMGSFVPAESAHIGVIDKIFSRVGATDNITAGYSTFMVEMIETATIVNQATDRSLVILDEIGRGTGVYDGLSIAQAVIEHIHNVNKCRAIFATHYHELTKVSKYLKNVKCFCVKIREWNGEVIFLHEVIEGIADESYGIHVAKLAGFPDSVLNRASEVFEELKA

SEQ ID NO: 4004 - DNA, 3393 bp, Culex quinquefasciatus (southern house mosquito)
  CDS (1)..(3393)
atgtccaagaacaaagataaactaaacaccagctccaatacgcttttcaattactttgccaagtcacccgcaacaacgcccaagctcaaaccatcgagctcgggcgggggaggaactccgaagacggtcaagcaggagaaagtgaccccgtcgccggcacgcaaggaatccgtggttccggaaaaggttcccaaagatgaggaggacgaggaagaagtgcagccgatgaagaagcgccgccggatcatcatggacgagtccgaggaggacagcgacgacgattccgaaaataaggtcaaaaatgagaaaacacccccgaaggttgttcaactggccgcgttcaagcgggttgaaacgccgaagaacggcggggaatcgccggtgcagaagaagataaagcttgaggttggggtggaagcagcgaaggagctgccggcggcgaaggaggacgacgatgatgggccggtgctggaggaaccgacgatttggctgcatcaaaagttggactttttgaagccggacaaaattaaggacatacaaggaaacaaggccaacagtgaaaagtatgacccaaggactctgttcgtaccggagagctacctcgcaacgttgacgccggctatgcggcaatggtgggagttgaagtcgcgacactacgattgcgtgttgttcttcaaagttggcaaattctacgagctttaccacatggatgcctctgtcggggtgaaggagctgggtttttcgtacatgaagggcgagtttgcccacagcggatttccggagcaggcgtacgagcggatggccacatcgctggtcgaacggggctacaaggtagcccgggttgagcaaacggagacaccggacatgatgtcggagcggtgcaagaagaacaaaaccaacagcaagtatgacaaggtcgtgaagcgcgagatctgccaggtgtcgctcaagggcacagaagtttacggccaacaggtccagatgacccaaagcgcagaccccaactacatgcttgcgattgcggagcgcagcgccgggaagggtaaatctggtggagtccgttacggcgtctgctttattgacacttcgttgggtattttccacctcggagagtttgatgacgatggccaggcgtctcgtttgttgaccctgttgtcccattacgctccggcgctggttctgcacgagcgcagcttggtttcgccgggcattcaccagatcttcaagacggtactggccggagtgcgcaaggaaccactcaccaacgagtcccagttttggtcggcggagaaaacgttgaaatacttggcggagaaccattacggcagctcgagcgacgaaaagtcggccaagtggccggaagcggtccgatgtctgctcgacaaaaacgaccatctcggtcttacgcccaacgaagattctgagctatcgctgaaagcgctcggcggttgcatctggtacctgaagcgctgcctgctcgaccaacaaatagttgccctggccaaattcgagctgtacattcccccggatgacaacgtgactcggaagcagctgaagatctccaacagcaaccggttcatggtgctcgatgcgattacgctgagcaacctgcgtctcacggatggcgagttgtcgctgctgaaccgcctggatcactgctgcacaaagtttggcaaacggctgctccatcactgggtttgttctccgagttgcgagcgcgaaatcatcattcaacgccaagacgccatcaaagaacttgtagaggacatcaacctcctgcaggatgtccgtcaaattctaggagagctgccagacctcgagcgaatgctggcccaaattcacagctttggaaatgcggagcgcatgaagaaccatccggacggccgggccatcctgtacgaagagcagacgtatagcaagaaaaaaatccaagacttcatctgtaccctgcgaggattcaaggccctaacccgactccctgaactattcgctggggtcaaatccgacctcctaattcgtctgacacaactaaccctaaaaggcggtgtcttcccggacatggcgagcaagataagcttcttcgaggaatcgttcgaccacgaagcggccctgaaaaccggcgtcattgcgccggaaaaaggattggacacggagtacgatgcggtgcagcgggacattcaggggattctggacgagctggaggagtacaagcgcaagcaggaaaagtattttggctgcaagatcgactactttggcagcgataagaagcggttccagctggagattcccgagggagcggcgaagaaagccaacagcgggtactcgctagaagggcagaaaaagggcaaaaatggagttaagcgataccacacggacgagacgcgcgagttcctgaagcgcatgatgcaaaccgaggaccagcggaaagtcgtactgaaggacttggcccggcgtatcttcgaaaaattctccagcgcgtacgacatgtggaagacgtgcgttgatttggtgggaacgctcgacgtgctgactgcgctggccgagtttggacgcagctcgggcagtacgtgcttcccggagattctggacaccgacgaggagaaagggcagattttcgagctcagcgaaggaattcacccgtgtgtgagcgatccggaaaactacatcccgaacggagtgagtcttggccaggatgggactcggttgatcctgttgaccgggccgaacatgggcggaaagagtacgctcatgagacaggttggagtgttggcgatcatggctcagattggtgctccgattccggccgaaagctgccgtttgacactgattgaccgcatttttacacgcttgggggcaaacgacgacatcatggctggtcacagcacgttcctggttgagctgaacgaaacttcgacgattttgaagcacgccacggagaagagtctggtgctgctggacgagttgggacgaggaaccgctacgtacgatggaacgtcgatcgccggagccgtggtccagtttctggcggaactcaagtgtcgatcgatgttttccacgcattatcacaatttggttgataacttcgaacgggacgagcgcatcctgctggggcacatggcctgcatggttgagaaggaggacgacgaagatccgacccaggaaacggttacattcctgtacaagtacgctcccggatcgtgccccaagtcgtacgggttcaacgcagccaagctggccggaatgccaccgcagatcatcaagcgtgcatacgagctctccaaaacggtcgaggcggaagcgcttaagcgcaaaaccttcacaaaatcgctgctccaagcagaccgcaccgaggtgcaggatctgctgcggaagctgaagggatgccggctttag

SEQ ID NO: 4005 - protein, 1130 aa, Culex quinquefasciatus (southern house mosquito)
MSKNKDKLNTSSNTLFNYFAKSPATTPKLKPSSSGGGGTPKTVKQEKVTPSPARKESVVPEKVPKDEEDEEEVQPMKKRRRIIMDESEEDSDDDSENKVKNEKTPPKVVQLAAFKRVETPKNGGESPVQKKIKLEVGVEAAKELPAAKEDDDDGPVLEEPTIWLHQKLDFLKPDKIKDIQGNKANSEKYDPRTLFVPESYLATLTPAMRQWWELKSRHYDCVLFFKVGKFYELYHMDASVGVKELGFSYMKGEFAHSGFPEQAYERMATSLVERGYKVARVEQTETPDMMSERCKKNKTNSKYDKVVKREICQVSLKGTEVYGQQVQMTQSADPNYMLAIAERSAGKGKSGGVRYGVCFIDTSLGIFHLGEFDDDGQASRLLTLLSHYAPALVLHERSLVSPGIHQIFKTVLAGVRKEPLTNESQFWSAEKTLKYLAENHYGSSSDEKSAKWPEAVRCLLDKNDHLGLTPNEDSELSLKALGGCIWYLKRCLLDQQIVALAKFELYIPPDDNVTRKQLKISNSNRFMVLDAITLSNLRLTDGELSLLNRLDHCCTKFGKRLLHHWVCSPSCEREIIIQRQDAIKELVEDINLLQDVRQILGELPDLERMLAQIHSFGNAERMKNHPDGRAILYEEQTYSKKKIQDFICTLRGFKALTRLPELFAGVKSDLLIRLTQLTLKGGVFPDMASKISFFEESFDHEAALKTGVIAPEKGLDTEYDAVQRDIQGILDELEEYKRKQEKYFGCKIDYFGSDKKRFQLEIPEGAAKKANSGYSLEGQKKGKNGVKRYHTDETREFLKRMMQTEDQRKVVLKDLARRIFEKFSSAYDMWKTCVDLVGTLDVLTALAEFGRSSGSTCFPEILDTDEEKGQIFELSEGIHPCVSDPENYIPNGVSLGQDGTRLILLTGPNMGGKSTLMRQVGVLAIMAQIGAPIPAESCRLTLIDRIFTRLGANDDIMAGHSTFLVELNETSTILKHATEKSLVLLDELGRGTATYDGTSIAGAVVQFLAELKCRSMFSTHYHNLVDNFERDERILLGHMACMVEKEDDEDPTQETVTFLYKYAPGSCPKSYGFNAAKLAGMPPQIIKRAYELSKTVEAEALKRKTFTKSLLQADRTEVQDLLRKLKGCRL

SEQ ID NO: 4006 - DNA, 3555 bp, Acyrthosiphon pisum (pea aphid)
  CDS (1)..(3555)
atgtcgaaaaacacgttgttcaattactttaccaggtcacccagctccggggctcccaaaaccaacgggtcgcccaagccccccgatggtgtcgttgcgtcgaagaccccatcaaaacgtcagttgtccaattctaataagggtagctctgtcactcctaagaggacaccgaagtctgcagtgaatggaagttcagggaaaaaaaccatcagcagcaatggcggtagtacaaagaaaaatactgaaaaaagaaaaccaagaccgcttgatgaatctatagaagaaaatgaagaaaacgaagagttgcctaggaaaaaacgtcgcaggcttgcattagaagatttgagcggtgatgaagaagattcaggggatgaatatgtgccagatatgaaagctttaaaagaatctgaatccgaagaaagtcctgaaccatctgacaatgattcatttattgatgatgaatctgatgaagaagtatctcctgttaaaataaaaagtgggaaaaatacgaaatctgttggaaaatctaaatttaataaatttaataaatcatatacccctgctgtggacaaatctaccaaagaaacaaccaaaattaatggagttgatcatgacaattggcctcatttaaaacttgaatttttgaaaccagaaaaaattaaagatgctaataagaaatcaccatctgatcctaactataatcctcgaacattatatgtaccagaagattttaaactgacattaactccgggagttcgtcagtggtgggagttaaaagcacaacatttcgattgtatattattttttaaagttggaaaattttatgagatgtatcatatggacgctgttacaactgctaaagaacttaatcttttatacatgaagggagactttgctcatgtgggatttccagaaactgcctatggtcgtttctctgcaattctaatagaaaaaggttatactgtcgctcgtattgaacagaccgaaacaccggatatgatgactgaaagatgtaaaataaaaaagagtactaaatttgataaagtagtgcggcgtgaaatatgtcgtattacaaccaaaggcactagaacttttggtattattgatggtgaaacaaatgatgctgaaaattcatttttgatagctatatctgaaaaagaaattagtagttcaacttctttatatggggtatgcttcattgatacatctattggtctcttccatcttgggcaattcgaagatgactgtcattgctcacgcttaagaaccttgtgtgctcattacccaccagtacaagttttatttgaacgtaataaattgacagtgcgtactaaaaaggtcattgatactatgctctctagtgctgttaaagatgcacttatccctgacatagaattttggccatcatcaaaaactttgattactttagcagaaggagattactttaaacatgacaataatttaattgaattatttataattaaactgtacaaatatatggactctgacttacaattgaatgctaatgacgaatgtgagtttggtattcgaagtttgggtgctgttatatggtatttacagcgatgtaaaatggacttccaacttttgtcaagaggaagatttgatatttataaaccaattgacgttaaatctgttgagttaaccaatcaagataacataaacagtaaacatatgatacttgatgctataacacttaaaaacctacatatattagaaaactctgcgggttcaaatgcaggaacattacttaacaagttaaatcattgctctacaccatttggcaaaagattactacaccagtggttgtgtaatccattgacaacaatatccagtattaaagctagacaaaacgcaatttcatctttaattgttattcctgatttaatgcaagaaatacgatcagaactagctagtttaccagacttagaacgtctgttttcccggatctactctcagagtagtaatggagttgaatcagaccatgcagaaactagagcagtatactttgaagagaagacttattcaaaaaggaaaataattgatttcatatcaatattgaaaggtttcagaacaagtgttaatataatggaaaaatttcaaaaggctgatatcataaaagagaattcagaatccaatttattggctgctatttgtaattaccctaacggctctgtccctggagtatttcctcatttgactgaacttcttgataattttgagaattcttttgatcatgacgaagctatgaaacatggtcgtatctttcccgagccggggatggacgatcagtatgacactgttttagaaaaaataaaagaagttgatattgagttaaaatcgtatttaaaagaacaatgcaaacactttgggtgtactgtcaattattttggatctgataaaaaacgatatcagttagaagtacctgatgctgcatcaaagagagctggagatggatatgaacttcaaaaccaaagaaaaggatacaaaagattcactacaaatcgtacaaaagaacttttggaaaaaatgatgagctatgaacaagaaaaaatagatgtattgaaagatctcagggaaagagtgttttcgcggttttgtgacaagtttgaggaatggaacaatgccatccaatgtttggctactctggatgtattcatgtcattagcagaatactgccggtgtgaagaagaagttatgtgtattcctacatttattccagctattattggcaaaaagccattagttgaacttatcgagggacgttatccatgcggttctggtggtgagagtttcattccaaacgatacaatcatcggaaaagaagaagatggaacgtggaattcaagtttgatattagtaacgggccctaacatgggaggcaagtctacattgatgagacagcttggcatcataactgttatggcacatatgggttgtcgggtacctgcaaaaagccttcttctcaatccggttgacaggatattcacgaggattggcgccaacgacaatataattgcaggagagtcaacattctttgttgaattgtgtgagacatcagctatacttcatcatgccagtcggttttcattagtcttagttgatgaactgggcagaggaacttcaacatatgatggaacagcaattgcttcagctgttgttacagaactagtacaaaaacaatgccgtacactattctctacccattaccactcgttagttgaagatttcaagatgaatccattagttgcacttggtcacatggcatgcatggtagaaaatgacgaaactaacgaaatagatactgaacaaactcaagaaacaattactttcttgtataagtttgcaaatggagcttgccctaaatcgtatggttttaatgctgctcgtttggcaggcatgcctgctgacatcataaaagttggtttacgtagatctaaagaatttgaaactgctgctaagcgccgaatactattcaaaacattgttttcgtccaatgacaaatctgttgtgaagactgctattttagcactataa

SEQ ID NO: 4007 - protein, 1184 aa, Acyrthosiphon pisum (pea aphid)
MSKNTLFNYFTRSPSSGAPKTNGSPKPPDGVVASKTPSKRQLSNSNKGSSVTPKRTPKSAVNGSSGKKTISSNGGSTKKNTEKRKPRPLDESIEENEENEELPRKKRRRLALEDLSGDEEDSGDEYVPDMKALKESESEESPEPSDNDSFIDDESDEEVSPVKIKSGKNTKSVGKSKFNKFNKSYTPAVDKSTKETTKINGVDHDNWPHLKLEFLKPEKIKDANKKSPSDPNYNPRTLYVPEDFKLTLTPGVRQWWELKAQHFDCILFFKVGKFYEMYHMDAVTTAKELNLLYMKGDFAHVGFPETAYGRFSAILIEKGYTVARIEQTETPDMMTERCKIKKSTKFDKVVRREICRITTKGTRTFGIIDGETNDAENSFLIAISEKEISSSTSLYGVCFIDTSIGLFHLGQFEDDCHCSRLRTLCAHYPPVQVLFERNKLTVRTKKVIDTMLSSAVKDALIPDIEFWPSSKTLITLAEGDYFKHDNNLIELFIIKLYKYMDSDLQLNANDECEFGIRSLGAVIWYLQRCKMDFQLLSRGRFDIYKPIDVKSVELTNQDNINSKHMILDAITLKNLHILENSAGSNAGTLLNKLNHCSTPFGKRLLHQWLCNPLTTISSIKARQNAISSLIVIPDLMQEIRSELASLPDLERLFSRIYSQSSNGVESDHAETRAVYFEEKTYSKRKIIDFISILKGFRTSVNIMEKFQKADIIKENSESNLLAAICNYPNGSVPGVFPHLTELLDNFENSFDHDEAMKHGRIFPEPGMDDQYDTVLEKIKEVDIELKSYLKEQCKHFGCTVNYFGSDKKRYQLEVPDAASKRAGDGYELQNQRKGYKRFTTNRTKELLEKMMSYEQEKIDVLKDLRERVFSRFCDKFEEWNNAIQCLATLDVFMSLAEYCRCEEEVMCIPTFIPAIIGKKPLVELIEGRYPCGSGGESFIPNDTIIGKEEDGTWNSSLILVTGPNMGGKSTLMRQLGIITVMAHMGCRVPAKSLLLNPVDRIFTRIGANDNIIAGESTFFVELCETSAILHHASRFSLVLVDELGRGTSTYDGTAIASAVVTELVQKQCRTLFSTHYHSLVEDFKMNPLVALGHMACMVENDETNEIDTEQTQETITFLYKFANGACPKSYGFNAARLAGMPADIIKVGLRRSKEFETAAKRRILFKTLFSSNDKSVVKTAILAL

SEQ ID NO: 4008 - DNA, 3363 bp, Magnaporthe grisea 70-15
  CDS (1)..(3363)
atgttgatgctccattcgcgtagttcctcctaccaggcggcctactcgcgcattaacagccgttatatcctcctcggcccgccctccggatctgtgaaaaccctcgatctcccacctactgccgatgcagagagcttggagattggtgatactcacggggcctcacgccacaccaggccacatcgcaaaccatcactacgattaaggcatctgcgcccgcacctgcctagcacggtaggcgacgatggttccatgagcaccagtcgtgtgcttctaggttcatgctctcacggacccatgggcagattgcccatctctttggctgcttcggtattccaccagcaacaaagctataggtaccagcaagtcaggggggccaagacaaggacggctgtgaagcccgatgatctcccaactgtcaaatgtgccaaatccaggaaaagggttaagccagaggagccgtcgaattccaagtctgccagtagacggaccaccatcaagcttgaagacttgcctcaggggctaataaaggacgcggagccacttccgctgcctgaagatgaaggcccgacataccctaccgtaatccagcaggcgcgtcggaacatgaacaggttcgacaactgcgttctgctgacccgcgttggtggtttctatgagctctactttgaacatgcccaggaaataggcccgcagctgaacctaaaagtagccacgaagaagactgctgcgggcaatgttgctatggccgggtttccttttttccagctcgaccggttcctcaaggtcctagtccaagaccttaaccgctacgtagcaatcgccgaggagttccccaatgatgctggcgacaaggtcaagtctgggggcctcatgcatgaccgccgtgttgcccgcgtcatcactcccgggaccttgatcgatgagaatttcatggatccctattcgaacaattatgtcatgtccatccacatgccagagccgcccagaatctccatgcgtgaagccaaggatgtctcggctgccgccgctgcagaatcactcgctgtccctcaacctttgatggaaaacatcgccaactcaccccttgggctcgcctggctagacctatccactggccacttcatcacccaatcaacaaccctcggctcccttacttcagtcctctcccgcgttagtcctaaagagatcgttcttgataggaccatcacaccttatgcatccgaagagctcctcactctactggcggaagaaagacggttgtcgacgcatgccaagcgcccagagcaatggacgcccgccgattgggccccaatgctcgagtctgaaatgccaccgcgctccatggaaatgttcaccaccgaggaggtccaggccagcaatctgctgctccactacgtcaaagatcgcctgcagaacataaatatcaagctccagccgccccgccggcatcagtccatggaggtcatgtccatcgacaaaaacagcatgcgctcactcgagatcaaaagcaccgtccgcgacggcgcccttcgtggcagtctgctgcatgccgtccgccgcacagtgacgaggggcggggcgaggctgctcgacgagtggctgagcgccccctctacttcgttagacgtcatcactgcacgacaggatcttgtctcgcgcttccggcaggacgagacattgcgcgacagcgttgtgctgcttctgagaagatgcgccgactcgcatcgtctcgtccagaaattcgccctcggccgcggtgatcccgatgacctcctcgatttatctcgcactattgccgcttctaacgaaatcgtttcgcgtctaaaaagcgccgtcgcgacgtccactggaccaggaaactcaacccctgaatcaggcagtgagtgcctagctaacttgatcggtcgcatcaacctatcccaacctctcaaactcgccaaaatgatccgcaacgcgatcgacgaggaaggcctggtacaacgtcatcagcttgaggaggaggcggccggcgagatggtggagctggcggagcgggtcgtcacggccacgggctcgacggacctcgccaacgtgctgcccaaatcagctcccagtcccacagcagctgccaagaagcgccgcgccgtagcgacgacatccatccgcgaatattacagcgccgataacgatgcctggatcatgaagtccggcgctagcgacgtgctgtctactcttcacgccgaactttcaggcctattgcaagagcgcactgagctccaagaatccctccaagatcgcctccaagcttcgactctcaccctcaagtggaccccaaacctcggccacatctgtcatgtcaagggcaaggatgcccgcgcgccactggacggcatcagatccctgtcctcctcccgcagcacccgctccttccaccacgacgagtggaccgacctgggcgcccgcctcgacaaggcacgcgtcgccatccgcgccgaggagcagcgcgtcttccacctcctccgccgcgccgtcgtcaaggctctcgtaccgctgcgccgcaacgccgccgtcctcgacgagctcgacgtcgtcaccggcatggcttgtcttgcgcacgagcggggctggatccgcccagtagtaaaccacgggaccgcccacgccatcatcggtggccgccacccgaccgtcgaggctggactcgccgaccgcggacgctccttcaccggcaatgactgcttcgtcggctcggcgggccatggccgcgtctggctcgtaactggccccaacatggccggcaaatcaacctttttgcggcaaaacgccctcatcaccgtcctcgcccaggtcggctgcttcgtgccggccgaccacgccgagctcggcatcgtcgatgccctcttcagccgtgttgggtctgccgacgatctttaccgcgaccagagcacatttatggtcgagatgctcgagacggctcagatcctccgcagcgccacgcctaggagcttcgtcgtcatggacgagattggccgcggcacgacgcccgaggatggaaccgccgttgcgtttgcttgcgtcgagcacctggtcaaaatcaatcgatgcagagccctgtttgctacgcatttccacgccgtgactgacctcgccgttgccaagggcatatatgcggcggagggcagcacggacggcgtcgagatgtattgcaccgacgttgaggaggatacgggtggtggcttcatatatatgcacaagctacgtaagggcgtcaacaggcagagccatgcactgaaggtcgcgcgccttgctggtttgcccgaggccgctatcaacgtcgccaaggatgtgttgcagaatggatatcaggtgcctacgaattaa

SEQ ID NO: 4009 - protein, 1120 aa, Magnaporthe grisea 70-15
MLMLHSRSSSYQAAYSRINSRYILLGPPSGSVKTLDLPPTADAESLEIGDTHGASRHTRPHRKPSLRLRHLRPHLPSTVGDDGSMSTSRVLLGSCSHGPMGRLPISLAASVFHQQQSYRYQQVRGAKTRTAVKPDDLPTVKCAKSRKRVKPEEPSNSKSASRRTTIKLEDLPQGLIKDAEPLPLPEDEGPTYPTVIQQARRNMNRFDNCVLLTRVGGFYELYFEHAQEIGPQLNLKVATKKTAAGNVAMAGFPFFQLDRFLKVLVQDLNRYVAIAEEFPNDAGDKVKSGGLMHDRRVARVITPGTLIDENFMDPYSNNYVMSIHMPEPPRISMREAKDVSAAAAAESLAVPQPLMENIANSPLGLAWLDLSTGHFITQSTTLGSLTSVLSRVSPKEIVLDRTITPYASEELLTLLAEERRLSTHAKRPEQWTPADWAPMLESEMPPRSMEMFTTEEVQASNLLLHYVKDRLQNINIKLQPPRRHQSMEVMSIDKNSMRSLEIKSTVRDGALRGSLLHAVRRTVTRGGARLLDEWLSAPSTSLDVITARQDLVSRFRQDETLRDSVVLLLRRCADSHRLVQKFALGRGDPDDLLDLSRTIAASNEIVSRLKSAVATSTGPGNSTPESGSECLANLIGRINLSQPLKLAKMIRNAIDEEGLVQRHQLEEEAAGEMVELAERVVTATGSTDLANVLPKSAPSPTAAAKKRRAVATTSIREYYSADNDAWIMKSGASDVLSTLHAELSGLLQERTELQESLQDRLQASTLTLKWTPNLGHICHVKGKDARAPLDGIRSLSSSRSTRSFHHDEWTDLGARLDKARVAIRAEEQRVFHLLRRAVVKALVPLRRNAAVLDELDVVTGMACLAHERGWIRPVVNHGTAHAIIGGRHPTVEAGLADRGRSFTGNDCFVGSAGHGRVWLVTGPNMAGKSTFLRQNALITVLAQVGCFVPADHAELGIVDALFSRVGSADDLYRDQSTFMVEMLETAQILRSATPRSFVVMDEIGRGTTPEDGTAVAFACVEHLVKINRCRALFATHFHAVTDLAVAKGIYAAEGSTDGVEMYCTDVEEDTGGGFIYMHKLRKGVNRQSHALKVARLAGLPEAAINVAKDVLQNGYQVPTN

SEQ ID NO: 4010 - DNA, 3015 bp, Gibberella zeae PH-1 (anamorph: Fusarium graminearum)
  CDS (1)..(3015)
atggcttctcaatccgcccattcctacctcccccatctcctcatcgtccccttcaaactagggggtctaattcagccgaagcccgtgtcacctaaatcaacgtcatcagagacttcatctccccacgatgagacgacagagtcgcagctgcagccgctgccgtctttgtcccaggatcctcccgcttaccctaccgtggttcttcaggctcgtcagaacatgctaaagtttgacaactgtgtgctattaacaagggtcggcggtttctatgagctctactttgagcatgcggacgaatatgggcccttgcttaacatcaaggttgctaacaagaaaacaaacgctggcttggtttccatgctcgacgtctcaccatcatcgcccgtcttgtttctgaaaattctcgttcaagatctcaatcgccatgtcgctatagctgaggagtttccaaactctcccacagcaaaggtcaagtcaggtgggctgatgcatgatcgccaagtaacacgcattgtcactccaggtactctgatagacgaaaactttatggatccatacgcaaataactacgtgatggcaattcatatcgacggaaatcatacatctacagaaactgctacggagacacctaaagacatcggccgagtgtcggctccagcgggagagcttgtggaccaagattcctcacccgagcttgcatcagcccatttaacgccgtcagctgttgatgttggccgagatggagggccgtctcaggggttccaggactccataccactcggcctggcatggctcgatctttcaaccggccatttctatacccaacaagccaatctcgcatccttaccagcgatcttatcccgtctgtctccgcgcgagctccttctggaccaggacctgcaagcgttccccgatcacggtatttttgcgcttctcgctgaggaccgtcacatcatttcatacgcaccacggcctcatgattcttccttgctgaatccggccgagtggacgcccatgcttgagtctgccctgcctgaggatgaagcaagtgctttctcttccgctgaggtacatgctgccggctttctcctgggctatgtcaaggaccagttacagggcgcgagcatgaaattgcagcccccgctaagaaccgagaatgtacagatcatgtccattgacaagaacagcctgcgagcccttgaagtaaagcaaaccattcgcgatggcgcatttcgaggtagtctgttacatgccatccgtcgcactgtaaccaagagcggtgctcggcttctcaatgaatggcttagtgcgccttcaacctcccttgagctcatcactggcaggcaggacctcgctgctttattcatcgatgatccaaacctgagtgactcagtagtcctcttgttacggagaagttatgactctcagcgccttgttcagaagttcactcttggccgtggtgacgctgatgaccttttggctttggccagcaccattgacgcaaccaaggagatcgtagacctgctgaagaaggccaacactgcatctcgcaaggccatttccccttgcttgacttctatgatatctcgaattaacatgaccaggccgctgaagcttgctcagcgtatcagagatgctatcgatgaagaaggaattgagttgcagcatgaagctcaggactctgagactagccagatgctagctctcgctcaagatgtcgccagtaatgaagggtcacaggatgacatagcctctcttcccaaaggcaaacgaaaaaggcccgtcagtatccgagatcattacgctgaagataacgaaacctggatcatgaagcctgctgctagtccaaccttgaagcgacttcatgcagggctagcagctttgatacaggaaaaggcagaactcaacgagactctttgcgaacgactcaaggctccgagtttaactctcaggtggacgcctggactcggccatattgctcatattaggggcagagacgcacgaaatcttgctaacgtgcaagcgctttcgtccagccgctccacacgatctttccatatcaccgaatggacacatcttggacagcgactcgaccaagttcgcacccagatccgtgccgaggaacaagctgttttccattccctccgggaacatgtcgttaagaatctcgttaagctgcgtcgcaatgccaacgtccttgacgaactcgacatcgcaacgtccttcgctaaacttgctcaagagcaaagcctcgttcgaccggtcctgaacaacacgactagtcatacaatcatgggtggacggcatcccactgttgagggtggtctctttgagcaggggcgaagctttgtgcgcaatgattgtttggttggatcacctaaggatggtcgtgtttggtttatcacaggccccaacatggcaggcaaaagtacgttcctgcgccaaaacgctctcatcacgattttggctcagatcggctgctacgtgcctgcgtcatacgcagagcttggaatagtagacgccatattcagtcgcgtgggctcagccgacaatctctatcaggatcagagcacctttatggtcgagatgctggagacagcggctatcctcaagcaggcaacaccccggtcttttgtcatcatggatgagattgggcgaggtactacacctgaagatggcacagctgtggcattcgcatgcctccatcacctcgcaactgtcaatcaatgccgcaccttgtttgcaacacactttcattctgtggcagacttggcagcagctgagggactgtgttcaacagagacagacgagggaggcattgtgcaaacatattgcaccgacgtagtggaggatggccaaggaggcttcttctacaatcacaaattacaaaagggcgtcaacagacgaagtcacgcactcaaagttgcgaaattggctggaatgccagatcgcgctattgacatggcaagacaggtactgcaggatggaggccttgaggattcaatcaagagttga

SEQ ID NO: 4011 - protein, 1004 aa, Gibberella zeae PH-1 (anamorph: Fusarium graminearum)
MASQSAHSYLPHLLIVPFKLGGLIQPKPVSPKSTSSETSSPHDETTESQLQPLPSLSQDPPAYPTVVLQARQNMLKFDNCVLLTRVGGFYELYFEHADEYGPLLNIKVANKKTNAGLVSMLDVSPSSPVLFLKILVQDLNRHVAIAEEFPNSPTAKVKSGGLMHDRQVTRIVTPGTLIDENFMDPYANNYVMAIHIDGNHTSTETATETPKDIGRVSAPAGELVDQDSSPELASAHLTPSAVDVGRDGGPSQGFQDSIPLGLAWLDLSTGHFYTQQANLASLPAILSRLSPRELLLDQDLQAFPDHGIFALLAEDRHIISYAPRPHDSSLLNPAEWTPMLESALPEDEASAFSSAEVHAAGFLLGYVKDQLQGASMKLQPPLRTENVQIMSIDKNSLRALEVKQTIRDGAFRGSLLHAIRRTVTKSGARLLNEWLSAPSTSLELITGRQDLAALFIDDPNLSDSVVLLLRRSYDSQRLVQKFTLGRGDADDLLALASTIDATKEIVDLLKKANTASRKAISPCLTSMISRINMTRPLKLAQRIRDAIDEEGIELQHEAQDSETSQMLALAQDVASNEGSQDDIASLPKGKRKRPVSIRDHYAEDNETWIMKPAASPTLKRLHAGLAALIQEKAELNETLCERLKAPSLTLRWTPGLGHIAHIRGRDARNLANVQALSSSRSTRSFHITEWTHLGQRLDQVRTQIRAEEQAVFHSLREHVVKNLVKLRRNANVLDELDIATSFAKLAQEQSLVRPVLNNTTSHTIMGGRHPTVEGGLFEQGRSFVRNDCLVGSPKDGRVWFITGPNMAGKSTFLRQNALITILAQIGCYVPASYAELGIVDAIFSRVGSADNLYQDQSTFMVEMLETAAILKQATPRSFVIMDEIGRGTTPEDGTAVAFACLHHLATVNQCRTLFATHFHSVADLAAAEGLCSTETDEGGIVQTYCTDVVEDGQGGFFYNHKLQKGVNRRSHALKVAKLAGMPDRAIDMARQVLQDGGLEDSIKS

SEQ ID NO: 4012 - DNA, 3363 bp, Apis mellifera (honey bee)
  CDS (1)..(3363)
atgtcgaaagtgaatacattatataattattttacatcgcctaaaactcctaaaacacctaaacaatcaaataataaacagatatccgatgaaaaacctacaacaccgaaaagagcaaggggacaattgaacaaagttaaaactccaagtaaagggaaagaaaataagaatcttgaagatagaaaaagaatatacaaagatgatgaagaagaagaaaaggaagaaagtgaaccaattcaaacaaaaaagcgaagattaattattcctgatgaagaatctggagaagattctggagatgaatttaaacctgacctagatgatgaatcagaagaatcagattcagtatctgaaggagttagtgaaagtgaaccaccaaccgcaagtgaagaagaaactccagagaaaaaacggaagattgttaattcttttgggaaaaaaccacaaaaaggtgcaaagaaaaatttcaaagaagataaaaaagaatcaaaagttcaacaacaaaatcaatcccaaggttcaaataatgttatagattcttggccacacttaaagtatgattttcttcaaccaaataaaatacgagatattaataaaaaatcaccaaatgattcagattatgatcctaaaactctatatgttcctttggattttttgaatcaacaaactccagctatgagacaatggtgggaattgaaaagtaaacattttgattgtgttcttttctttaagctaggaaaattttatgaattatatcatatggatgctgtaataggtgttaatgaacttcatcttacctacatgagaggagaatttgcacattcgggatttcctgaaattggatatggccgtttttcagcgagtctcatagaaagaggatacaaagtggccagagtagaacaaacagagaatccagatatgatggcacaacgagttagcaatatgattagaccaacaaaatttgataaagtagttaaaagagaaatatgccaaataacttctaaaggtacaagagtgtacactccacaagatatagaaccatctacacccaattctaattatttattatcagtgattgaaaaatgcccatctggttctaacatatctcattatggagtttgtttcttagatactacaataggagatttttatcttggtcaatttgaagatgatcgatgtaattctagattattaactttacttgctcattatcctccagttcatgttgtttatgaacgtggtaatttgtctcaaaaaacgttacaaatttttaacaataatttagcagcatgtattaaagaatcacttttacgcgaatctcaattttggtcatcttcgactacattaaaaaatcttcatgaaggagattattttaaaaaatcagattccgaatttcaatggcctacaggcttacaatcatatcttaataaaagtgatagtttaggtttaactcctgctgaagataaagaattagcggtacatgctttaggtggatgtatatatttactcaaagaatatctgcttgaacaacaattattggcacaaggacgttttaaaacatatattcctccagatttttcaaataaaacatttgttttagatgctatcacgattaataatttgagaattttcggggaaggttctcttataaaaacgctagatcgttgttgtaccgcatttggaaagagattgttgcgagaatggatttgtagaccatcttgccgaaaagatgttataattgaacgtcaagaagctatacaagaattaatgaatcattcagaagcagtacaaactactcgtagtatattagcagggcttcctgatcttgaaagattattgagcaagattcatgctcaaggaaatccagcaaaacaaaataatcatcctgatggcagagctattatgtttgaggggcaaacttattcaaagaaaagaattacagattttattaccactttgaatggttttgaagatgtcttaaaaataattgctttgtttgaagatttctgtagcaccttaataagcaaatgttgtaaagtggaaccagatggtgaatttccttcattaagagaatctttagattattttaagactgcattcgaccatgaagaagccaaaaaagtaggttgtattgttccaaagaaaggagttgattctgaatatgattccgttttaatggaacttgaggaaataaagaaagattcagaacaatatcttgaaaagcaaaaaaaacactttggagtgaaaattacgtttcacggttcggataaaaagcgttatcagatcgagattccagattctcaaacgaaaaaagttggtgctggatttgaacttcaatcacaaagaaaaggatacaaacgttattacaccgcagagtcaaaggaacttttaagtcgacaaataaatgccgaagaacatagagataaagtattgaaggatttaaatagaagaatatttgcacagtttagcgaaaaatatgatatgtggagtatggcagtttataaattgtctgttttagatgttcttatttctttaacagaatatgctttcagtggtgatatgtgtataccggaaattaatgatggtacaaatgaaaagatatttattgatattcgagatggacgacatccatgtattatttcagatacatttataccaaatgacactttattagcaactgaaaattttgcttctttcatgattctcactgggccaaatatgggcggtaaatcaacattgatgcgtcaagttgcccttctcactataatggcacaaattggaagttatgttcctgcaagttcctgtcgtttaacattagtagatcgtattttcacgagattgggagcaaatgacgatattttggcaggtcaaagtacattcttagtagaattaagcgaaacttctgcaatattacagcatgctacaccatattctctcgtattactcgatgaattaggacgtggtacatcaacatatgatggcacggcaattgctgctgcagttgtaaatgcacttacaaaattaaattgtcgtactttattctcgacgcattatcattctttggtagaagattataaaaataataaaaaaattacattagctcatatggcttgcatggtagaaaatgaggaacaagataaagtatctcaagaaacagtaacatttttatacaaactcagcgaaggagcttgtccaaaatcgtatggtttcaacgctgcccgattaggtggtgttccagctgtaattacaagtagagcacatgagatttcaaagaaactcgaacaagaaacaaatcgaaaacacttctttattactttgtgtaaagcgaatggttcaactataagggatctaattgctgcaatgtga

SEQ ID NO: 4013 - protein, 1120 aa, Apis mellifera (honey bee)
MSKVNTLYNYFTSPKTPKTPKQSNNKQISDEKPTTPKRARGQLNKVKTPSKGKENKNLEDRKRIYKDDEEEEKEESEPIQTKKRRLIIPDEESGEDSGDEFKPDLDDESEESDSVSEGVSESEPPTASEEETPEKKRKIVNSFGKKPQKGAKKNFKEDKKESKVQQQNQSQGSNNVIDSWPHLKYDFLQPNKIRDINKKSPNDSDYDPKTLYVPLDFLNQQTPAMRQWWELKSKHFDCVLFFKLGKFYELYHMDAVIGVNELHLTYMRGEFAHSGFPEIGYGRFSASLIERGYKVARVEQTENPDMMAQRVSNMIRPTKFDKVVKREICQITSKGTRVYTPQDIEPSTPNSNYLLSVIEKCPSGSNISHYGVCFLDTTIGDFYLGQFEDDRCNSRLLTLLAHYPPVHVVYERGNLSQKTLQIFNNNLAACIKESLLRESQFWSSSTTLKNLHEGDYFKKSDSEFQWPTGLQSYLNKSDSLGLTPAEDKELAVHALGGCIYLLKEYLLEQQLLAQGRFKTYIPPDFSNKTFVLDAITINNLRIFGEGSLIKTLDRCCTAFGKRLLREWICRPSCRKDVIIERQEAIQELMNHSEAVQTTRSILAGLPDLERLLSKIHAQGNPAKQNNHPDGRAIMFEGQTYSKKRITDFITTLNGFEDVLKIIALFEDFCSTLISKCCKVEPDGEFPSLRESLDYFKTAFDHEEAKKVGCIVPKKGVDSEYDSVLMELEEIKKDSEQYLEKQKKHFGVKITFHGSDKKRYQIEIPDSQTKKVGAGFELQSQRKGYKRYYTAESKELLSRQINAEEHRDKVLKDLNRRIFAQFSEKYDMWSMAVYKLSVLDVLISLTEYAFSGDMCIPEINDGTNEKIFIDIRDGRHPCIISDTFIPNDTLLATENFASFMILTGPNMGGKSTLMRQVALLTIMAQIGSYVPASSCRLTLVDRIFTRLGANDDILAGQSTFLVELSETSAILQHATPYSLVLLDELGRGTSTYDGTAIAAAVVNALTKLNCRTLFSTHYHSLVEDYKNNKKITLAHMACMVENEEQDKVSQETVTFLYKLSEGACPKSYGFNAARLGGVPAVITSRAHEISKKLEQETNRKHFFITLCKANGSTIRDLIAAM

SEQ ID NO: 4014 - DNA, 2850 bp, Candida glabrata CBS 138
  CDS (1)..(2850)
atgctgcgatgtttgtcgttggctagaatacgattttgtaagcttaggtttcctgtaaggctcatatcgcagagcagaattactgaacaagaggtgatcaagattaagctaggggaattcatagccaatgatgctagaatcactagaacgatagatgaggagtcgacaaatactaaaacattgcctccttcgctgttatatgtgcagaaattaattagtcagtacccagaccatgttgttcttacccaaatgggctcattttttgagttatactttgatcatgcttcgacatatgcgccattattgaacattgccttgacccagagaacttatactcatggcaaagtcccttttgctggtttccctgtacctcaattaagcagacatttgaaggcattagtccaagattatggttacagtgttgtagttgcagaacagtttaagaaagatggctacgcaacaaatgaaaataatagattctatagacgtgttactagaattgtaacgccaggcacatttatagatgaagcattagataattactctgagaatacttttctgctcacaattgagtttcctgagaactttactaattatgttgcagaggataacttgagaattgggatatcttggtgtgatatatccactggagaaatctatatccaagagctgcctttaaaggatcttatgaatgctattacaagaataaaaccgaaagagatcctattaaatgcgagagagctctcagatgatattatctctggtaactggtatccacagttagcagaactaaaaaggtacttcatcaattattatactacaaccactagatatagaactctcgatacttattttgatatgtttgctgctactagggcgtctggtatgagacaaagactgaggatggaattgaacgagtactctataaaggagactgcagcattgcggaatcttctatcctacgtagctgaacatttgccagaatgcgcaataaacttccaatttccaaagagacagattacaacggatattctacaaattgactccagaacgactaaagcattagagttgcacagcacgatacgtgataattcaaaaagaggaacgctcctaaacactatgagaagaactgtaacacctatggggactaggttattatcacaatggctatctggtccatcgatgaatatcaaagaaataaagttaagacaaagtatagtatcgctttttcttgctgataagcgctcccatgataaaataatatctgagctgaaaaagattcaagatatagtaaaattgttgcagaaattcaactttggtagagggacacctctagaaatgctggaactagtgaaatcactaaaaacagcccaagttttacaaagtttactcaatgacctattaaaggagagtaatggcaaatctaaaaatggaattagtgagattattgaaagactaacatttcctgaattatttttggaagagatttctaatgctttaaatgaggaacatataatatatcagggtgagagaacctttaatacagagggagagatagccataaaagagactatccttcctgatgaaagagcccaactaaagagcaaggataatggctacagtttaaagttgataatcaatcccgagtttagctctgctatacaatcattactagctgaacgttcgcaattgttaagtcaaaagcagaacttgagaaaagactatgaaacattctttatcgatcgttttggagttaaatcatttttactaaaacagaaagcatcgggtgagtttgtaatccatgtaacagcaacttcgactgtgattacgctattattaaaacacctgaaagagaataaggaaagtcttggttttactatagtacaaaaatcctcacaaacgtgctggttgatgcataaatcctggagcgatctagctgataagttaaatcaaaatgaacagagtatacgatatgctgaagatggcatcatcgatgggttcatctccgaaattctaaagaagagtgacgatattagagttgttgctgatgctattggttatatagatacattgtgctctttcgctacattagctgaggagaaacagctcattaaaccgaaagtggatttgaccagaagtttcgagattgttgatggaagacatttggtagtggaggatgcattgaagaaaaaaaatttggtaccttttaccgcgaacaactgtgatttatcaagcaacgatatatgggttatcagtggtcccaatatgggcggtaagtcaacttttctgagacagaatgcgatcattgcaatactagcacagataggatgttttgtaccttgtaggaaagcacatattggacttgtcgacaagatatatagcagagtcggaagcgcagatgatctttataatgatatgagcacatttatggttgaaatggttgaaacgtccctcatactgaatggagctacagatagatcgttagcaattttggatgagataggtagaggaactagtggcaaagaaggcgttgctgtagcctatgggactctgaaacaccttttgcaaaacaacaaatgcaggtcattatttgcaacccactacgctcaggaactgaaacaagtggcagaccaggatctctctgaagatacccaccgtatacattacttccagacaagtatcagggaaacaaatgacccaaacaagttctattacgatcacaagatgaggcccggcatcagccaaaaatcggatgcactgaaagtggctcgtatcgcagggttcccacaggacgccttgaatgacgcatccacagcattaaaactactgtgttcagcacgatctatttaa

SEQ ID NO: 4015 - protein, 949 aa, Candida glabrata CBS 138
MLRCLSLARIRFCKLRFPVRLISQSRITEQEVIKIKLGEFIANDARITRTIDEESTNTKTLPPSLLYVQKLISQYPDHVVLTQMGSFFELYFDHASTYAPLLNIALTQRTYTHGKVPFAGFPVPQLSRHLKALVQDYGYSVVVAEQFKKDGYATNENNRFYRRVTRIVTPGTFIDEALDNYSENTFLLTIEFPENFTNYVAEDNLRIGISWCDISTGEIYIQELPLKDLMNAITRIKPKEILLNARELSDDIISGNWYPQLAELKRYFINYYTTTTRYRTLDTYFDMFAATRASGMRQRLRMELNEYSIKETAALRNLLSYVAEHLPECAINFQFPKRQITTDILQIDSRTTKALELHSTIRDNSKRGTLLNTMRRTVTPMGTRLLSQWLSGPSMNIKEIKLRQSIVSLFLADKRSHDKIISELKKIQDIVKLLQKFNFGRGTPLEMLELVKSLKTAQVLQSLLNDLLKESNGKSKNGISEIIERLTFPELFLEEISNALNEEHIIYQGERTFNTEGEIAIKETILPDERAQLKSKDNGYSLKLIINPEFSSAIQSLLAERSQLLSQKQNLRKDYETFFIDRFGVKSFLLKQKASGEFVIHVTATSTVITLLLKHLKENKESLGFTIVQKSSQTCWLMHKSWSDLADKLNQNEQSIRYAEDGIIDGFISEILKKSDDIRVVADAIGYIDTLCSFATLAEEKQLIKPKVDLTRSFEIVDGRHLVVEDALKKKNLVPFTANNCDLSSNDIWVISGPNMGGKSTFLRQNAIIAILAQIGCFVPCRKAHIGLVDKIYSRVGSADDLYNDMSTFMVEMVETSLILNGATDRSLAILDEIGRGTSGKEGVAVAYGTLKHLLQNNKCRSLFATHYAQELKQVADQDLSEDTHRIHYFQTSIRETNDPNKFYYDHKMRPGISQKSDALKVARIAGFPQDALNDASTALKLLCSARSI

SEQ ID NO: 4016 - DNA, 2823 bp, Kluyveromyces lactis NRRL Y-1140
  CDS (1)..(2823)
atgtataggagaagcactgctctattgattccgtattttagatctagttttctgcgacgttcatctacggtccaaacaccaaaaactgagaaattgaagatttcattattgaatgatgataccttgattgaaacagaatctcttccaacttctgcaattagaaccaaatcaagtgatcgcggtggcagagagacacgtaactcgttacctccatctttacaatatgtacgcgatgttatggataaatataccggacacgtagtgctcacacagattggatcgttttatgagttatactttgaacatgctacaatatacgcaccaatattgaacatcacactgaccagtaaatctattgtttcagggaaagtaccatttgcaggatttcctttgaatcaattgaacagacacttaaaggtccttgtgaaacaatatggatatagtgtagccgtatgtgaccaattcaaacatgaaacattagttgataatgataaaaataagttcatgagaagagttactagaattgtcacacccggaacattcatcgatgaagctttcgaaaatttccaggaaaatcagtatttactcactgtacacttctccgaaaactgtatgaaaagagctgcagatttgaacattccagtaggtttgtcttggtgtgatatatctactggtgaaatatttgtgcaacaggtatatttgaaagatttagtgtcttcaattactagaataaggcctatggaagttcttttggatgaggagataatgcccgtcgaaattacgaatggtgaatggtataaggaattaacagaattgaagaaatattttatcaagtatcaaaagatgccttccaaacatcgtcctattcaatccttctttaaattgttctcaaatgcagaaggtgacattggaagatcattgggaaacttcacccaaaaagaaattgcggcactcagaaacctcctgctttacattgaggaacatcttccggatatcaacactaatctagaactcccacagaaacaacttatcacagatataatgcaaattgattccagaacaagtacagcgttggagttacattctacaatgagaaaacatcacaagaaaggctcacttttgtcgacaattcgaagaacagtaaccacatccggaactcggcttttgactcagtggttatctgcaccatcaatggacataaatgaaataaaaaatagacaatctcttgtgctgctcttcaaagataattttgattacactgaatcccttatacggtatttgaaagaaactgctgatatgtctagaattatacaaagattctcttttggacgcggagatccattagagttaattcaaatagctaagtctttgaggaaatgtaaagaaatttctgaatacctccagactaatgttcatccctcaaccaaaaaaactgagaaattgatcaaaaatataacgaaacaacttaatttcgaagatcctatcgtagaaaaagtcataagcagtcttaatgaagagtcgttaattaaacaatggtctgaaaagtatgagagggatgacgaagaaaaatttgatgccagcgaagaaaatcaagagagaaaatctttggtgatgataatgaaaccaagtgcatcacaaaaattgaaagaatactataaaagctacaacatcttgattaaggagaaagaaagcttattacaatggtacaaagattggtttctcgaacgttttaaacttaaaaacgtttcattaaaacagaaaaactccggagagttttgcatacacttgagtgggagtattgcaaatgtagttgagtttgataagtacattgaacagcagaaagattcatctcaagcacattctgggttccatgtgctccaaaaatcaagacaaactagatggataatacacgataaatgggaaactttgtccagagaaattgaagtagttggtgcactgattaaaaatgaagaagagcgtttaatcaatcaatttcaaaaggatttcatttcattgagccccatgattagatctttatctcagacgcttgattatatggatgttctcacttcatttgctaaattggcaatcgaacaaaggctagtccttccaaaagtcactcaaggtacggagcttaatataaaaggtggacgtcatctagtggttgaggccagtatttcgcagaaatcgttggagagtttcacgcctaatgattgccaaatcaactcaggcgaactttgggttatcactggacctaatatgggaggaaaatcaacatttttgagacagaacgcaataattgtcattttggcacagattggatcatttgtaccttgtgaaagtgcggttattggattagtggataaaatttttagcagagtcggatctgcggacgacctttataacgaaatgagcacattcatggttgaaatgattgaaacaagctatattcttaaaggtgcaaccaatagatctatggcaatcttagatgagatcggtagaggtacgagtcgctcagaaggtgtcgcaattgcatatgcaactttgaagtatcttacgacaaataatgcctgccgtgctctgtttgctactcattttggtacagaacttgccagtacgatcaatagtacatccaatgaggagtttatcaacaatatatctttttttaaaacaggtattattggtgataactccaatttctattatgatcataaattgaaaccaggtatttgttcaaaatcagatgctattaaagtagccaaattggcgggcttccctgaggaagctttggaaattgcttctactttattggaagaaatttaa

SEQ ID NO: 4017 - protein, 940 aa, Kluyveromyces lactis NRRL Y-1140
MYRRSTALLIPYFRSSFLRRSSTVQTPKTEKLKISLLNDDTLIETESLPTSAIRTKSSDRGGRETRNSLPPSLQYVRDVMDKYTGHVVLTQIGSFYELYFEHATIYAPILNITLTSKSIVSGKVPFAGFPLNQLNRHLKVLVKQYGYSVAVCDQFKHETLVDNDKNKFMRRVTRIVTPGTFIDEAFENFQENQYLLTVHFSENCMKRAADLNIPVGLSWCDISTGEIFVQQVYLKDLVSSITRIRPMEVLLDEEIMPVEITNGEWYKELTELKKYFIKYQKMPSKHRPIQSFFKLFSNAEGDIGRSLGNFTQKEIAALRNLLLYIEEHLPDINTNLELPQKQLITDIMQIDSRTSTALELHSTMRKHHKKGSLLSTIRRTVTTSGTRLLTQWLSAPSMDINEIKNRQSLVLLFKDNFDYTESLIRYLKETADMSRIIQRFSFGRGDPLELIQIAKSLRKCKEISEYLQTNVHPSTKKTEKLIKNITKQLNFEDPIVEKVISSLNEESLIKQWSEKYERDDEEKFDASEENQERKSLVMIMKPSASQKLKEYYKSYNILIKEKESLLQWYKDWFLERFKLKNVSLKQKNSGEFCIHLSGSIANVVEFDKYIEQQKDSSQAHSGFHVLQKSRQTRWIIHDKWETLSREIEVVGALIKNEEERLINQFQKDFISLSPMIRSLSQTLDYMDVLTSFAKLAIEQRLVLPKVTQGTELNIKGGRHLVVEASISQKSLESFTPNDCQINSGELWVITGPNMGGKSTFLRQNAIIVILAQIGSFVPCESAVIGLVDKIFSRVGSADDLYNEMSTFMVEMIETSYILKGATNRSMAILDEIGRGTSRSEGVAIAYATLKYLTTNNACRALFATHFGTELASTINSTSNEEFINNISFFKTGIIGDNSNFYYDHKLKPGICSKSDAIKVAKLAGFPEEALEIASTLLEEI

SEQ ID NO: 4018 - DNA, 2859 bp, Debaryomyces hansenii CBS767
  CDS (1)..(2859): transl_table=12
atgatacttcgtaagttgcaactccagaatagatttcggtcaagtgggttgaaattatctactcaacttcgaaattttacaaaaacgaacttttattgttacgctcagaaaactaaggttgttaagtcaacaattgatattgataatgaattagttgctgctacagagcttccacttttggattgggacagaggaggacgtacacagaacgaagccttgactccgttatacgcttctatgaaaattctaattgatgctaatccaggatgtgtttgcttgatccaagtgggaagcttttatgagctatatttcgagcaagctgaaatttatggacctaagttaggtttaaaggtagctaccaggaaaacaaatagttattctataccaatggctggatttcccacataccaattgcaaaaatttgtcaaatcattagtgcaagacttagaacaaaacgtcgcaattatagatcaatatccccttgagagacgtataaatgagtcaattatccatcgcaaaatttcaaggattgtctccccaggcacccttgtggacgaaacatttttgaactataatcagaataactatctagttgcaatcgcgtttcctgctaaattcactaaaactccggccgatttagatctttgcattggactttcatggatcgatatatcggttggagagttttatgtacaacaaaccactttaggtgagctcatagctgatatatcacgaattaacccaagcgaaataatcatttcaaaggaatttcaagaggataatttaactagtggtcaatggcacctgtgcctacaagatctaagaaaatactttattcgctatcacaagactgtttacaaggatttgaaacttcaattcaagacaaatttgcaaaccacaagaaaaaaattggaaagcttttcgattaaggaagaaatggcaatgaatatggttttatcttatattaacgtgaatctccctgatacagatccgacgcttgatttacctattcagtattggaacgaagaccgtcttcaaatggatgcacgaacccgtgaagcgttagaattgactgagagatcaacaggtgggcacacatcggtagtaggatccctattaaccactattaagaggactataacaccgtcaggaacccgtttgctaactcaatggcttaagtcgccaattttggatgtatctgaacttcgtagtcgacaggagttcgttattctttttaaagaaaataactaccttaaactatctttaagaacccaattaacgcaattgggtgattttattcgttcagtccaaaggcttgtattcggtactggtgatatagtagcacacctacaatacatcggtgatggcttaaccaaactagaaagcctccattcgtttctcaaagaagaagccaaaaaggatatttttgcaggaaaagtattggatccatttctcaagcagttcaaagtaagcagaactgtagctgagaagatattttctacactcaatgtaactgaaattgccaaccatggaatttcagagactgatcaagacgaaacagaggaacatgatgaatcgtctacgtcatattctaatagtaatcaatctatcgaaaaatataaaggcataagaaaacagaactcggagcttggtatgtttttttcagtcagaaaagattatgatccaatattgaaagaagctcataataagttagatgaacttatgattcaggaaagcaatttgataaagtctatacggacacaaattcaagaaattgattcgaaactaactatcattaagaagtctcaacatggaagatacattaatgttttgtatatttcaggtaagcaaaagctgatagacgaagcttataaattgttatcagtagatattcgtgaaaggagaaaaggctccttattatacaaaccagaatcatggggaaagttgcaagcgttaatagatgagcaaattgatattatcaaagagtctgagaaggaaataattgatgcattgcgtcaagaggttctaaatagagtttcagaaataagaaatgttagcaaattagttgactatcttgatgttacatcttcgtttgcaattttagcggaagaaaataacttagtatgtccgaagtttgtaaaaactcctcagttaaacatcgttggtggtaggcatattgtggtggaatcaggtttgaaaagtgtcagtgatatgtttattccgaatgatactaaggttggctctgatggcaatttatgggtgatctcaggtccaaatatgggaggaaaaagtacgtatttgcgacaaaatgctcttattgttattttagcgcaaatcggttcctttgttcctgctacaaaagcaagcataggtatagtggataagatattcacaaggattggagcgtctgacgatctttacagtgacttgagcactttcatggtcgaaatggtagaaacaagtaatattttaaagaatgcaacgccaaggtcgttggctattgttgatgagattggtcggggaacaagtggaaaagaaggattagcaattgcatatgcaactttgttggatttgctccatgttaataaatgccgaacgttatttgcaactcattttggtaaagaacttcaaagtctattacttgccaacaacgttaaacaagataaaattcggtattacagaacgaaagtgttgcataaggatacctcgctggaagatgggaattatagtttaattatagatcatgcactcgagccgggtattagtgatagatcatacgctcttgaagttgctaaaatggcaggatttcctgaatcagcattatctaaagctcgagaggctttaaaattaataaaataa

SEQ ID NO: 4019 - protein, 952 aa, Debaryomyces hansenii CBS767
MILRKLQLQNRFRSSGLKLSTQLRNFTKTNFYCYAQKTKVVKSTIDIDNELVAATELPLLDWDRGGRTQNEALTPLYASMKILIDANPGCVCLIQVGSFYELYFEQAEIYGPKLGLKVATRKTNSYSIPMAGFPTYQLQKFVKSLVQDLEQNVAIIDQYPLERRINESIIHRKISRIVSPGTLVDETFLNYNQNNYLVAIAFPAKFTKTPADLDLCIGLSWIDISVGEFYVQQTTLGELIADISRINPSEIIISKEFQEDNLTSGQWHLCLQDLRKYFIRYHKTVYKDLKLQFKTNLQTTRKKLESFSIKEEMAMNMVLSYINVNLPDTDPTLDLPIQYWNEDRLQMDARTREALELTERSTGGHTSVVGSLLTTIKRTITPSGTRLLTQWLKSPILDVSELRSRQEFVILFKENNYLKLSLRTQLTQLGDFIRSVQRLVFGTGDIVAHLQYIGDGLTKLESLHSFLKEEAKKDIFAGKVLDPFLKQFKVSRTVAEKIFSTLNVTEIANHGISETDQDETEEHDESSTSYSNSNQSIEKYKGIRKQNSELGMFFSVRKDYDPILKEAHNKLDELMIQESNLIKSIRTQIQEIDSKLTIIKKSQHGRYINVLYISGKQKLIDEAYKLLSVDIRERRKGSLLYKPESWGKLQALIDEQIDIIKESEKEIIDALRQEVLNRVSEIRNVSKLVDYLDVTSSFAILAEENNLVCPKFVKTPQLNIVGGRHIVVESGLKSVSDMFIPNDTKVGSDGNLWVISGPNMGGKSTYLRQNALIVILAQIGSFVPATKASIGIVDKIFTRIGASDDLYSDLSTFMVEMVETSNILKNATPRSLAIVDEIGRGTSGKEGLAIAYATLLDLLHVNKCRTLFATHFGKELQSLLLANNVKQDKIRYYRTKVLHKDTSLEDGNYSLIIDHALEPGISDRSYALEVAKMAGFPESALSKAREALKLIK

SEQ ID NO: 4020 - DNA, 2925 bp, Yarrowia lipolytica CLIB122
  CDS (1)..(2925)
atgaaaagggtctctcagaaggttctgagacgggtcaacgtgttatcacgtggcattcacgtgacgcggacctctcgacagcaaccgtacactcctcaccaggcctggcccacgagttcggagattgtggccttcaagactggcaaggccgctcgcaagaagttccagacaacctcggagacgatagagttggtagaactcgaatcgacggttttggaagatgacaatgtaactggtcttccgccttcaaagggtctcagtgaggtgtcgccgtcggatgtggtttctggtgtgttttcggtgatgagccagtatccggacagcgttgttttgacacaggtgggctcattttacgaattttatggctctcatgcggacaaatggggctcggaactgcatctgaaggtgggaaagaagacctacaacaagggcaagctcactagcatgactgggttccctctgacacagctggccaagtacctgaagattctggttgagacgtaccagcagaaggtggtgatatgtgagcaggttgaaacagatgattccagcacaagtttgatgttttcaagacctgtgactcgtatctacaccccaggaacgcttattgatgaggacttcctacctacaaacagatacaactacctgatgagcatttggattgctcccgagtcgataagacgccccgatgagaccaaagacgtggctgaaactcccgtaggaatctgctggctggatgtttcgctgggaacgtgttctgtgtcccgatctagtcttggaaatcttgcatctgatattgcgcgcatcaaaccccaggagattgtcatggaaaaacgaatgaaggaactggagcttgagaacggcgagttttaccccgagttggtggagttgcggtcggctcctctgtcatactctcagccagctacttctactaccgatttcgagttcgagccgtttttccgggttccaaaagcttacattaatgacactctcacccaaattgatagtcatgctctcaaggcccttgctatggctttggagtactcgaaatcgcatttcccgcttggaactctcactttcgatcctcccaatgtcgagctgtcgaccgaacatattatgaagattgactcgagaagtatcgaggctctggagctgttcaagaccatgagagacgctcgaaccaagggttccttgctgtctaccctcaacggaacgaaaacggatgctggaacacggtgtctgacagagtggctatcagctcctttgaaccacaagcaagagattgagagacgactggactcagtggagacattcaaaacacgtaatccgctgtcgttgtcactatcggctcaaatggcccaggtcaaagacattcttcgaattgccaacatgtttgccattaacagaggtaagccttaccagctgctcgagtttgcagacagctgtttgcttgtaaacgatatgtatcatcgattacaaaccgaacacgcgaaatctgctcttccagagtcgctacttgagcaaatggaacgtctgaaacaggttcctatggatttagtcgagactatttattctaccattgaacggagagatgtggacacgtcattgtcggaaagttctggatctggagaagaatctgagtcttctgagttctctttcggacagctggagtgtgagattcgtcctgaggcatcccccaagatgacaaagctgtgcaagactctggacaaactgcataacaaaaagacacagcttcaggaggacattgtggaggagatgacgaagctgttccctaagtttcggtcatccagacgcaaggtggagctcaaggtgaatgttatgggcccggtggtatcaatctctggacgtcccaataacatgcctgaccagttcatgggctgtgaagttaccaaacgaaagtctttgtgttcgtttgtgtttcctgagtgggtcaaactggctcagaatatggacgatgtccatgtcaagatcagacaggaggccaaaacgatattggacgggctgatggagaatatcaaggacaagcatcaggatatccgagctgtaggcgcgtctttagcctacattgacactgtcatttccctggctaatctagcaaatgaattcaacatggttcgaccgactactgtcgaatcagggcccactgagattgtcgacggacgtcatttgactgttcaacattcgttgagggtaggaggaacgcagtttgtgtccaatacgtgccgcctggaccccgaagatcaatatgtgtgggttgtcagtggccccaacatgggcggaaaatcgacttttctgcgtcagaacgccataatcgtgctgctggctcaaatgggctcgtttgtgcctgcgaaatcggctcagattggtttggtggaccgactatttgtgcgagctggtgtggccgacgacctgttccgaaacaagtcgtccttcatggtggagatgattgagacttctgtcatcttgcgtcaagcaggacccaaatctatggttatcctggacgaagtaggacgaggaacatccttcagagatggtattgctgtcgcatacgctacgctggattacctgtaccgtttttccaagtccagagttctgtttgcgacccattttgctaacgagatcacaaatttgttccctgacaactacgacacttccggaattgcatactacatgtctgaagtgcttgaaaaggaggactactccagcaagaatctgctagcagtagaccctttccagcggacagctcacagtctgtactctctgaccctagagggagtgcagttcaccagacgaattgtaccgggtatcagccaggactcgcatggaatccagattgcccaagctgcggggtttcccaaggaggccgtggaaagtgcattggaggtggtggccaaatccaagtag

SEQ ID NO: 4021 - protein, 974 aa, Yarrowia lipolytica CLIB122
MKRVSQKVLRRVNVLSRGIHVTRTSRQQPYTPHQAWPTSSEIVAFKTGKAARKKFQTTSETIELVELESTVLEDDNVTGLPPSKGLSEVSPSDVVSGVFSVMSQYPDSVVLTQVGSFYEFYGSHADKWGSELHLKVGKKTYNKGKLTSMTGFPLTQLAKYLKILVETYQQKVVICEQVETDDSSTSLMFSRPVTRIYTPGTLIDEDFLPTNRYNYLMSIWIAPESIRRPDETKDVAETPVGICWLDVSLGTCSVSRSSLGNLASDIARIKPQEIVMEKRMKELELENGEFYPELVELRSAPLSYSQPATSTTDFEFEPFFRVPKAYINDTLTQIDSHALKALAMALEYSKSHFPLGTLTFDPPNVELSTEHIMKIDSRSIEALELFKTMRDARTKGSLLSTLNGTKTDAGTRCLTEWLSAPLNHKQEIERRLDSVETFKTRNPLSLSLSAQMAQVKDILRIANMFAINRGKPYQLLEFADSCLLVNDMYHRLQTEHAKSALPESLLEQMERLKQVPMDLVETIYSTIERRDVDTSLSESSGSGEESESSEFSFGQLECEIRPEASPKMTKLCKTLDKLHNKKTQLQEDIVEEMTKLFPKFRSSRRKVELKVNVMGPVVSISGRPNNMPDQFMGCEVTKRKSLCSFVFPEWVKLAQNMDDVHVKIRQEAKTILDGLMENIKDKHQDIRAVGASLAYIDTVISLANLANEFNMVRPTTVESGPTEIVDGRHLTVQHSLRVGGTQFVSNTCRLDPEDQYVWVVSGPNMGGKSTFLRQNAIIVLLAQMGSFVPAKSAQIGLVDRLFVRAGVADDLFRNKSSFMVEMIETSVILRQAGPKSMVILDEVGRGTSFRDGIAVAYATLDYLYRFSKSRVLFATHFANEITNLFPDNYDTSGIAYYMSEVLEKEDYSSKNLLAVDPFQRTAHSLYSLTLEGVQFTRRIVPGISQDSHGIQIAQAAGFPKEAVESALEVVAKSK

SEQ ID NO: 4022 - DNA, 2772 bp, Candida albicans SC5314
  CDS (1)..(2772): transl_table=12
atgatactaagaagaaatagtataataccactccgccatttgacttcaggttgtcggctctttgctagaaaagcagccactaaaaaggcaccgtcacctctacttgaggaatgggatcgcggggggagaaatcaagatacagggctttcccctttattagcatctatgaagcgattgatagatctgaatcctgggtgtgttagcttaatccaagttgggagtttttatgaactttatttcgagcaggcggaggaatatggtcctaaattgggactaaagattgcaaaaaagaaaaccctgaatcatgttgttccattcgccggatttccaactacacaattgcgaaaatttacagaaatgctaattcatgaacagcaagttaacgttgccattattgatcaatgtgaccaagggtccaagacaaatcaaaatttggtgcatcgtaagatttcaagaatcattacacctgggacattaattgacgagtcgtttctaaatttcaacgagaataactaccttgttgccatttcgtttgctcccagctcattgagtcttccaccagacccacaaatgaaagttggactatcatggactgatatttccgttggtgaatcatttgtacaactaaccacattaggtgaattgagttcagatattgccagaatcaaccccagtgaaatattgctacctaaggagttccaagaccacaatttacatttgggtcaatggtatagccccttacaggaattgaaacgctatatcatcaggtatcatagtactaccaactataacgagttgaaattacaatatcatgacagtattcaaaaagttagaagacatttggaaactttttctccacgagaacaagctgccttaaatatgataatgtcgtacatgagtataaacttacctgatgttgatattttgatgactttgccaactagatatttcaatgagacttgtttacagatggattcaaggacaagagaagctttagagttaaccgagagaacgatagctggaagaacctcttctgttggttcattggtttctgtcattaagcgaacatgcacatcgtccggtacgaggttgttaactgaatggataaagtccccatctttagacaccaaagatatcgaaaagagacaatcatttgtaaaaatgtttttgaaaaatcagcacttaaaaatagtgactagacagcatttacagcagttgggtgatttcataagaaacttgcaaaagttagtggtgggacgtggagatcctgtcaatcagttagtgtatgcagcaagcactttggatggtttacaaaaattacgggattttttggttgaagaatacgaacagaaccccaaaaaattgtcttgtttaaaaaatctccttgaaaaatttgacatcccaaaacatttagcagagaaaatatataacacaatagatattgaggaacagacaattcccggtgaaggtagtgaagagatcgaggagccaacagaggtagttgaagatactaatctgagttacactaatagtttcctagagaaatatcgatcaaaacaagaggggaacacggacgcagaaaatttttattctgtgaaaagagatttcaatgacgaattgaagattttgcatgacgagttgagtgagttggaagtggaggaacacaaactttggagtaagttgcgcaatgtccttgacgatattgatgtgaaattaaatatcggcaaaaaaattgtacttggccgttacaataatgtaattttaataactggcaaaacatcttcaataagtaaagcaagtgctaaattggatggtgatattctctatgagaaaaaaatgtcacttgtatacagatcaacagaatggaatgatattcagcatctaatattagacaaaaaggaagccattttgttggttgaaagaaaaatcatagaagagctcaaactggaagtaacacggagatttcctgaatttcgtgaattggctgggttggctgattttctagatgtcacttcttcccttgcaattgtcgcagaagagaacaattggacctgtcctaagttaattaaaactcctcgtctctcagtggaaggtggtaggcatgttgttgttgaatctagtttgaaagattctggcaatatgtttatccccaatgattccaaaatgggtacagatgggactttgtgggttatctcgggtcccaacatgggaggtaaaagtacttatttaagacagaatgctttaattgtgattttagcacaaattggttcatttgttcccgctgaaaaggcaactatagggttggttgataaaatttttactcgtattggagcaactgacgatttattcaatgatttgagtacttttatggtggaaatggttgaggtaagcaacattttaactaatgcaaccccgctgtcattagccattgtcgatgagattggacgaggaacaagtggcaaagaaggattagcaatcgcatatgctacattactcagtctattgcaagttaacaaatgtagaaccttgtttgctacacattttggaaaagaattggaacagcttttggttgccaataatatagaccaaaaaaatattcgctattttcgtacaagagtattagagaatggcgacaatgagaaaggctttgttatcgaccatacattggagccgggaatcagtgaacgttctcatgcattagatgttgcccgaatggcagggtttcctgaaaacgcactaaaggctgcagaaaaagtactagataatttatag

SEQ ID NO: 4023 - protein, 923 aa, Candida albicans SC5314
MILRRNSIIPLRHLTSGCRLFARKAATKKAPSPLLEEWDRGGRNQDTGLSPLLASMKRLIDSNPGCVSLIQVGSFYELYFEQAEEYGPKLGLKIAKKKTSNHVVPFAGFPTTQLRKFTEMLIHEQQVNVAIIDQCDQGSKTNQNLVHRKISRIITPGTLIDESFLNFNENNYLVAISFAPSSLSLPPDPQMKVGLSWTDISVGESFVQLTTLGELSSDIARINPSEILLPKEFQDHNLHLGQWYSPLQELKRYIIRYHSTTNYNELKLQYHDSIQKVRRHLETFSPREQAALNMIMSYMSINLPDVDILMTLPTRYFNETCLQMDSRTREALELTERTIAGRTSSVGSLVSVIKRTCTSSGTRLLTEWIKSPSLDTKDIEKRQSFVKMFLKNQHLKIVTRQHLQQLGDFIRNLQKLVVGRGDPVNQLVYAASTLDGLQKLRDFLVEEYEQNPKKLSCLKNLLEKFDIPKHLAEKIYNTIDIEEQTIPGEGSEEIEEPTEVVEDTNSSYTNSFLEKYRSKQEGNTDAENFYSVKRDFNDELKILHDELSELEVEEHKLWSKLRNVLDDIDVKLNIGKKIVLGRYNNVILITGKTSSISKASAKLDGDILYEKKMSLVYRSTEWNDIQHLILDKKEAILLVERKIIEELKSEVTRRFPEFRELAGLADFLDVTSSLAIVAEENNWTCPKLIKTPRLSVEGGRHVVVESSLKDSGNMFIPNDSKMGTDGTLWVISGPNMGGKSTYLRQNALIVILAQIGSFVPAEKATIGLVDKIFTRIGATDDLFNDLSTFMVEMVEVSNILTNATPSSLAIVDEIGRGTSGKEGLAIAYATLLSLLQVNKCRTLFATHFGKELEQLLVANNIDQKNIRYFRTRVLENGDNEKGFVIDHTLEPGISERSHALDVARMAGFPENALKAAEKVLDNL

SEQ ID NO: 4024 - DNA, 3384 bp, Ustilago maydis 521
  CDS (1)..(3384)
atgagcaagatgcggcttagcgcgcacggtgcgacggccacgtttgccactcccaatagccacgcttggcggcgaagcacatcgtactctcgagactcgacgccgttaccgtctcaatttgtgcatgcgagctcttgcactcgtatggaagcgtggatacgatgcacagcgcttgctacgagcaatctggctctaccagctgacaagacgcgctacttgagcgccgccatccgccatgcccagtgtcgaccatccaacacgcgcacgagcagcttgacaagaccaaacgtgaggtatgcctctcaatcgtgtgcagatcgccaagaagcagctctgaacacatccccttcaacacgaaccaaacgacgcacaactgtagcatacgattcactcgcgtcttcggttctgggcgaagacggtcaaccactaccggctctggcagctttgacacctgcagtacggaagcgcagccggagcaagtcacgcaccaagccgtacactgatgcagccacatgcgcagaagcatcggcgcaagagactgagagcatccgatggccaccactagcgcaaagcgtgctcgacgatatggcgcgtttcccatcgaccatcctgctgacgcgtgttggcggcttctacgaatcctacttctcgcaagcaccgcaactcgcatcgatgcttggcatcaagctcgccaaccgtcgatggggcggccaagacgtacccatggcaggcttccctgtcttccaattggaaaagtacctcaagatcctcgtcctcgataaacggctgctcgttgccatctcggaagagttccgaccgaaagacgacaaagtcggaaacgccaccgagatcacaaggcgagtgaatagggtcgtcagtcctggcacgctgattgacgaaaagttcctggatccgtttgtcaacaatttcatcgttgccgtcagcgtcatgcacgagcaggacaaggtgaggtatggtctcgcatggctggatgtgggcacggcagacttcaatacagcggtgtgcgaggactttaagacattgagggacgagatcgcgaggattggaccgaaggagatcgtcatcgatgctggcacgatcgatgctagtgaggcgcaagaaggtgttgtccagcaggtgattgcagagcgagtacaagagaagcgcatcaagctcgatataagggagctagtcaccgattcgagtatctacatttcccactttcatccacctcctccctctcctcctgcaaccaagcctgttgaaacgcatcaagaatcagctgcacaagacacttttgcgccaccgacaagctcgctcgacgcggttgagacagccacggtgcacgcgcttctctcatacctacgcacgcgcctgctagaccacgaaaccgcctcgacgctcacgtcgctctcgctctcgcgtccgctccaccagccactcgactcgatcatgcagatcgacgcgcacacgctctgcgcactcgaaatccgctccacggggcgccaaggctctacgcgcggatcgctcttctcggtcctccgtcgaaccgtgacacgcggcggcacgcgtctcctccagcaatggctttgcaatccctccacctcgatcagcacaatcaacgcgcgcttcgatgtcgtcgagctcttcctgcgtcgcaaagctctgcgcgaagatgcaaggtcgattttgaggagcggagcaggtgacgtgagtagggtgctgcagaaactgatgaccaggagaaatgatgagcaggatctgttagaggtgagagatgcaatcggagcgatggataggctaaagaggttgatgcagtctgaggtggagtttatggcttgtgaagaaaaggagaggcagacgctggagaatctggtgtccaagtttcacgatctgaccgacttggcgagcaggttgggcgacgcaattgatgaaagagtgatcgcattgaggttggagaggcaggagacgctcgcggcggaagtccaagacattgccgcagcgtcgtctgcttcagacggttcgcgtgctcagattcgaaacctcggtagcggcactcccactcgcgctgcggctgcatccaaaggcgtcagtgcggccaagcgcggtggaaacagtagcgtcgcagccgaccatgtggatcctgacgactcttgttcgctctggggcgatgatttcgaacacctgatacgacccgcctcgtctaaagcgctcgccagtctcacacgctcgcatcgcgcgctgcggcgcaccgcgcgcaggctcgaactcgactttcaacaagcctacgcatccgacaatgttacgcttcgctacgtgctcggtcaggggtacgtcgtgcactcgcgtggtaaagctttggcgtcgactcctaacgtggcgctgccgtcgacgtgcacgtcgtcgatggaggatttgagcgtacacattgctggcaagaatcgttcgacgcacacgtactactgcgctacatggaccgctcttggatcgcggctggatcggctgtgcaaggaaatgcaagcgctcgagtcgatcgagcttgaggcactgcgtcaacacgtgctggaacaagctgcgcagttgcgcaccaacgccaggttgctcgaccagatcgatgtgctatcgtccttctcgcaagcgtcggaagagtatcatctggtgcgaccaatcgtcgatgattcaaccgatatcgacgttgctggtgcgcgacatctgtctgtggaaatgggcttgctcgaacgcggtcgactgtttacgccgaattcactcaacctctcggatggaggtgttcacatcatcaccggtcccaatatgggcggcaagtcgacttttcttcgatcgatcgctctgcttactatcctagcgcaatgcggctgcttcgtcccctgttcgcatccctcacgtctcggactggtagatcgcatcttcacgcgcataggtgctcaagacgacgttttccgcgaccgctccacattcatggtggaaatgtgtgaggttggcgaaatcctgaatcgtgccacacaccgttcactcgtcattgccgacgaaatcgggcgtggcacaagcaacctcactgggatcgctgtcggcttcgcaacactcgagtgcctctggcaacgaagatgcaggacgctgttcgcaacgcatttttacgaaatctgcgatctggtcaaagaccaagcttggccgcgagtcgagttttggtccaccgatgtccaccataccacacacggctccttggtgtatcaacatgaattgaagaagggcgtcaacaccaacagctatggtctgcaggtcgcaagattggccaacctgccagagcacacgttggagttggccagcacgacgttggccaagttgaaagcgaggacgcgcggcgcttag

SEQ ID NO: 4025 - protein, 1127 aa, Ustilago maydis 521
MSKMRLSAHGATATFATPNSHAWRRSTSYSRDSTPLPSQFVHASSCTRMEAWIRCTALATSNLALPADKTRYLSAAIRHAQCRPSNTRTSSLTRPNVRYASQSCADRQEAALNTSPSTRTKRRTTVAYDSLASSVLGEDGQPLPALAALTPAVRKRSRSKSRTKPYTDAATCAEASAQETESIRWPPLAQSVLDDMARFPSTILLTRVGGFYESYFSQAPQLASMLGIKLANRRWGGQDVPMAGFPVFQLEKYLKILVLDKRLLVAISEEFRPKDDKVGNATEITRRVNRVVSPGTLIDEKFLDPFVNNFIVAVSVMHEQDKVRYGLAWLDVGTADFNTAVCEDFKTLRDEIARIGPKEIVIDAGTIDASEAQEGVVQQVIAERVQEKRIKLDIRELVTDSSIYISHFHPPPPSPPATKPVETHQESAAQDTFAPPTSSLDAVETATVHALLSYLRTRLLDHETASTLTSLSLSRPLHQPLDSIMQIDAHTLCALEIRSTGRQGSTRGSLFSVLRRTVTRGGTRLLQQWLCNPSTSISTINARFDVVELFLRRKALREDARSILRSGAGDVSRVLQKLMTRRNDEQDLLEVRDAIGAMDRLKRLMQSEVEFMACEEKERQTLENLVSKFHDLTDLASRLGDAIDERVIALRLERQETLAAEVQDIAAASSASDGSRAQIRNLGSGTPTRAAAASKGVSAAKRGGNSSVAADHVDPDDSCSLWGDDFEHLIRPASSKALASLTRSHRALRRTARRLELDFQQAYASDNVTLRYVLGQGYVVHSRGKALASTPNVALPSTCTSSMEDLSVHIAGKNRSTHTYYCATWTALGSRLDRLCKEMQALESIELEALRQHVLEQAAQLRTNARLLDQIDVLSSFSQASEEYHLVRPIVDDSTDIDVAGARHLSVEMGLLERGRLFTPNSLNLSDGGVHIITGPNMGGKSTFLRSIALLTILAQCGCFVPCSHPSRLGLVDRIFTRIGAQDDVFRDRSTFMVEMCEVGEILNRATHRSLVIADEIGRGTSNLTGIAVGFATLECLWQRRCRTLFATHFYEICDLVKDQAWPRVEFWSTDVHHTTHGSLVYQHELKKGVNTNSYGLQVARLANLPEHTLELASTTLAKLKARTRGA

SEQ ID NO: 4026 - DNA, 3174 bp, Cryptococcus neoformans var. neoformans B-3501A
  CDS (1)..(3174)
atggtcccaaagatacgctgggggctgtatcgccatctccgatgcttgccggtcactcagcctcgggcaattagatcacatgctttggtgactacagctcggtcatttgacaaggtgacaacggcgacctctgtcaaacccaaacctaagctcatcaagacaaaggctagactatcagatttgccagcgacgaagctgggatcgaacggcttgccacagaagccattggaagcatgggatgaaagagacgtgcctcccaaccgttcgaaatcccccaaaacggtcagggcagccaaagcgcgtagcgatggcgccaggagcccagtaattccctgttcaaaggcagaattggaacttcttcaggatgccatacgacagggtgttatcccagatactcctttggctcatgaggtatatctcaattggaagaggtttccagattgcattttgctcacgagagtgggaaagttctatgagtcatattttgaacccgctcggtatttggcttccatcctttcgctgtcccttgcagaaaagaaatacggcgcgaacgaggctaagaggtcatacccattcgctggttttccggtacatgcactggacaaatatctcaagatgcttgttcaagacttgggacacaccgttgtgctcgtggaggagtatgatacagaaggagccgttgcccatactggcaaaaagctcaccgcaggctccggaccaaaggaacgtagggtgtacagagtcgttacgccggggactatggtcgatgagtcgtgggtggatgcagatcagagtcgatacttgctcgccatcgctgtaggcaatgagggccagaatggtcaggaactatctctcgcttacacagatgcttccactggagaatttttcactaaggatacgactgtctcacagatggaagatgagctcgctcgaattactccccgtgaagttgttctagataattcgctctacgaactgtggcgagaacattataactattcggaaatgaagcggaaagatgcctctcaggttgaagagctgctcgcgctacttcgagtactaggcgtcagagtgtcctttgccgacccctgtcgtccgcctccactctacacatctgcctcatcaccaactttacaccctaccacaccggaagagaatgctgctgcgctcctccaacaccatctccagtatgctttgcgagagtcgatgccagcacttcgtcgacctcacaagcaatccaattcggccttcatgcaaatcgatgctgcaaccctccaagctctcgagatacgccatgcttttaggccagggggattaattgctacgggcgagacacaaactaattcatctcccttgtctgccaagggtacgcttctctcagtggtatccaagactataacatcttccggccatcgactacttatacgcactctcacagctccttcgacatctccccatataatcaactcccgcttggcgctggtacaagcctttatggatagagaggatcttaaaactgaacttcggcacgagctgaaagagctgggggatatcatgcggatcattcagcggtttagaggccaaagaggcactggacgtgatatatgggacgttggaaggtggataaggggtgctcagagaatattggagactatcaaggaagagatcaaaatcgaagttggccgaaataacgagaaagcgatacggaaatcggaaggcatcacaaggctgcaggaattcgtggactcgtttcgtgatcttgacagaatcgcctccaaaatcgaatcctctgtggaagaatctgccatcatgttcagatccggcgatgataagagtatcattgatgagcaagaagctggtgatgcgctgcttacaagtcaggcatcatctaaagaaagtgaagcagacgaaaagcagaggatcaagcgggagagggatgagagagagatgtcagagtggtggattcgtcctcagttctcgcctgcgctccaacttcgacatgacgaactgagtgctttgaaagccgaagcccaaaagttacaagcaagcctaatcaagaagtatgatacgcctactctgactattgagaagaaccacagattcagctatcacattcaaatgtcagcaaaagatgctgaaaaggtggcgaaagcgagatctctggagcgtataggaagcatgactggtaaaacagcatactttgcctacgcgccgcttgcggaactgggtacgagaattgagatcatgatggaatatctaggcgctgctcaaaggcgagctgctcgggaacttcaaaatatggtggtagagcaatcggacgcgatccagcaaaattccgaattagttgatgagctggatttgagcctgagctttgctcagaatgcagttgagatgaactgggtcaggccaatactggacaattctacggagctacagatcattaatggtagacatccttccgttgaatcttctttgctgtctgcttctcgcaatttcaccccaaacagtactcacatggcttctgatacccatttgcatgtcatcaccggccccaaccagggaggaaagtcgacccttcttcgacaaactgcagtcatagcaatacttgcccagagcggaagcttcgttcctgctgaatacgtgaagatgggaatcgtggatcgggttttcagcagagtgggagctagagatgatctatggagggatcggagcacgtttatgcttgaaatggttgaaactgcagggatcttgcgccatgccactgagagatccctcgttatcatggatgagattggacgcggtactacgttacaggcaggtgtctcaatagcgtatgccacacttgactatatcctcgagaacatcaagtgccggacattgttcgccactcattatcacgaactgggacaaatgctaggatacgatccaaaaagggctgaaggagaggtgataaagggaagaagtgggattgctttttggtgcacggatgtaaatgaggcggatggcgctttttcttattcttacaagctacgaccgggtataaattacgattctcatgctattaaagctgccagtatcgccggcatgccagaatcttttctacgtgtagccgagtcgacgctcgtaaccctccaatcaaaatccaatcttattacattgccatcatctcattag

SEQ ID NO: 4027 - protein, 1057 aa, Cryptococcus neoformans var. neoformans B-3501A
MVPKIRWGLYRHLRCLPVTQPRAIRSHALVTTARSFDKVTTATSVKPKPKLIKTKARLSDLPATKLGSNGLPQKPLEAWDERDVPPNRSKSPKTVRAAKARSDGARSPVIPCSKAELELLQDAIRQGVIPDTPLAHEVYLNWKRFPDCILLTRVGKFYESYFEPARYLASILSLSLAEKKYGANEAKRSYPFAGFPVHALDKYLKMLVQDLGHTVVLVEEYDTEGAVAHTGKKLTAGSGPKERRVYRVVTPGTMVDESWVDADQSRYLLAIAVGNEGQNGQELSLAYTDASTGEFFTKDTTVSQMEDELARITPREVVLDNSLYELWREHYNYSEMKRKDASQVEELLALLRVLGVRVSFADPCRPPPLYTSASSPTLHPTTPEENAAALLQHHLQYALRESMPALRRPHKQSNSAFMQIDAATLQALEIRHAFRPGGLIATGETQTNSSPLSAKGTLLSVVSKTITSSGHRLLIRTLTAPSTSPHIINSRLALVQAFMDREDLKTELRHELKELGDIMRIIQRFRGQRGTGRDIWDVGRWIRGAQRILETIKEEIKIEVGRNNEKAIRKSEGITRLQEFVDSFRDLDRIASKIESSVEESAIMFRSGDDKSIIDEQEAGDALLTSQASSKESEADEKQRIKRERDEREMSEWWIRPQFSPALQLRHDELSALKAEAQKLQASLIKKYDTPTLTIEKNHRFSYHIQMSAKDAEKVAKARSLERIGSMTGKTAYFAYAPLAELGTRIEIMMEYLGAAQRRAARELQNMVVEQSDAIQQNSELVDELDLSLSFAQNAVEMNWVRPILDNSTELQIINGRHPSVESSLLSASRNFTPNSTHMASDTHLHVITGPNQGGKSTLLRQTAVIAILAQSGSFVPAEYVKMGIVDRVFSRVGARDDLWRDRSTFMLEMVETAGILRHATERSLVIMDEIGRGTTLQAGVSIAYATLDYILENIKCRTLFATHYHELGQMLGYDPKRAEGEVIKGRSGIAFWCTDVNEADGAFSYSYKLRPGINYDSHAIKAASIAGMPESFLRVAESTLVTLQSKSNLITLPSSH

SEQ ID NO: 4028 - DNA, 3240 bp, Tribolium castaneum (red flour beetle)
  CDS (1)..(3240)
atgtcgaaacggttcagcacgggccaaagtaacacccttctgaattatttccaatctccgaaaagctcaaatggtaaagacgtcaagcaaaacggcgccgggaaaagggatcttgtttctaataaggacgagggagacgtatccccagttcaagccaagaaacgcaagaaaacgacaattatcgacagtgactcagacgatgagcatttgccgatccagccaacttccaagaagtcgaaaaacgggaagaaacggccggtgagcgactcagacagcgagtcttcggacagcgacagcaagcccgccgagaagtcgctcaaactgtccgcttccaagacaaatgagaaaagcgcagccaaagcggccccaattgtcagcgatcttaacaccaattggttgcacaatcggcttgacttcctccaacccgataaaatccgcgatgttaataagagacggcccgatgatccagactatgaccctcgcacactttacattcctcagagcttcctggagaagcaaactccggcaatgcgtcagtggtgggtcctgaaaagcacccacatggactcggttttgttcttcaaagttggaaagttctacgagctttaccacatggatgccgttgtgggggtcacacaactggggttttcctacatgaagggggagttcgcccactccggctttcccgaaagcgcctaccataagatggcaaatgctttaatcgagaaggggtttaaggtggcaaggaccgaacaaaccgaaacccccgaaatgatggccgaaaggtgcaaaaaacagggacgtgccaccaaattcgataaagtagtcaatcgggaaatttgtcaaatttcaacgaaagccacttgcgtctacaccgcacagttgcccgatgccatgcattcgcagtcttgttacatgtatgccattgcagagaaggacgtaactggttcgcaaagaagattcggaatttgttttattgatacgtccattggcgtcttcaaactggcagagtttgatgacgacaaacactgttcaaagcttttagtctgtctttcggaatatccaccaggattaatcttgactgagagaaagaagctgagctccaaactaaaactaattttaaacaccaactacagagatgttcggcgagaatcgctggctcccgagagtcaattttacggtgccagcaccactattgaaaaattactgaacgggaattattttcgtaacgaaagtaatgacctgtgtttgcctgaagtcctcaaaaacgtcacagacggatataacgctaagccagagtttgagttaatggtgaaagcgttaggtggctgcttgtggtacttgcatgactctaagctcgacattcaggtcgtttcgttggggaaattcgagatttaccagccgttggagatgaatgtgcgggagaaaagcccccgcagttgcatgattttggattctgtgacaattgtcaacttgaatctcttgggtgaagagaacagtttgcaaaaaacgttggattattgtcagactgcgtttggcaaaaggttgctgacacagtggatctgtcggcctttgtgtgtcgttgagaaaattaaagaacggcaagaggcggttcaagagctggtcaaaaacacgtctttgttgaaagacgcacaagacgttcttaaaaaattgccagatttggagcgacaattggccaagattcacacttacggtaacaaattttttgcccaagatcaccccgacagtcgcgctgttttctacgaagcggccacttattctaaaaggcgaattggcgacctcttgaaaactttgcaagggtttgaactggcacagaacttgtgcccgttgttcaaaggctgccagtcgtcgttacttaagcgcttgactcaatttaaacccgacggtcattacgttgatttgaccgaactgttgttgttttttaaacacgcgtttgaccaagaagaggcccagaaagaaggtaaaataatcccaaagccgggcgttgacgagaattacgaccaggcacaagatgctatcaaggcagtaacgaaaaaactcgatgagtatttagtcgaactgcaacaatttttcggctgcaaagttacatacttcggttcggataaaaaacgcttccaaattgatattcccgaaagtcacaccaagaaagtaacaagtgaataccaactcgaagggactaaaaaaggcgctaagccctcaaaacgttactcaacgtccagaagtcggcaacttctagcagagatgatgaaagcggagagcgagagggcgaaagttatccaagatttgaaccggaggattttccagaagtttagcgaaaagcgcgagcagtgggagcaagccattgattgtattactgtcttggacgtgttgtgttctctagcgcaatatgcttgcaatttcggacaggatatatgtattcctgaaattgaaccaatgggaaactcagataaaattgtcattgaaaatggtcgtcacccctgcattacaaacattgataacttcgttcccaacgacactaaaatgggagttgccgattttgcgaacattttgctcatcactggacccaatatgggtggtaaatccactctgatgcgtcagattgccattatttgtattatggcacatatggggggttacgtgcctgcgtccggctgtactttatctctgattgatcgaatttttactcgtctgggggctcatgacgatattgttcaaggccagtctacgttcttggtagaactgtccgaagctgcagttatgttgcatcatgcgacgccacattcgctggtcctgcttgatgagttaggtagaggtacttccacgcacgatggaaatgctatagctaccgcgtatgtggaaaaactaacaacgattaattgtcggacgttgttttctacgcactaccacagtcttgtggaccattttgaggcgaggcgagacgtgcagttgggacatatggcttgcatggtcgaaaacgacgacgatccgactgaagagtcggttactttcctgtataagatggcaagagggcgctgtccgaagtcgtatggtttcaacgtagcgcgactctcgggcttgaaacattgcattgtttcacgagggcgggaaatatccaaacagttggagaatgaatccaaaagtcgtcaagttttcagggatttattcacatctagtgtggcaacgattagatctgctatgtcaaagttatctctctcttaa

SEQ ID NO: 4029 - protein, 1079 aa, Tribolium castaneum (red flour beetle)
MSKRFSTGQSNTLLNYFQSPKSSNGKDVKQNGAGKRDLVSNKDEGDVSPVQAKKRKKTTIIDSDSDDEHLPIQPTSKKSKNGKKRPVSDSDSESSDSDSKPAEKSLKLSASKTNEKSAAKAAPIVSDLNTNWLHNRLDFLQPDKIRDVNKRRPDDPDYDPRTLYIPQSFLEKQTPAMRQWWVLKSTHMDSVLFFKVGKFYELYHMDAVVGVTQLGFSYMKGEFAHSGFPESAYHKMANALIEKGFKVARTEQTETPEMMAERCKKQGRATKFDKVVNREICQISTKATCVYTAQLPDAMHSQSCYMYAIAEKDVTGSQRRFGICFIDTSIGVFKLAEFDDDKHCSKLLVCLSEYPPGLILTERKKLSSKLKLILNTNYRDVRRESLAPESQFYGASTTIEKLLNGNYFRNESNDLCLPEVLKNVTDGYNAKPEFELMVKALGGCLWYLHDSKLDIQVVSLGKFEIYQPLEMNVREKSPRSCMILDSVTIVNLNLLGEENSLQKTLDYCQTAFGKRLLTQWICRPLCVVEKIKERQEAVQELVKNTSLLKDAQDVLKKLPDLERQLAKIHTYGNKFFAQDHPDSRAVFYEAATYSKRRIGDLLKTLQGFELAQNLCPLFKGCQSSLLKRLTQFKPDGHYVDLTELLLFFKHAFDQEEAQKEGKIIPKPGVDENYDQAQDAIKAVTKKLDEYLVELQQFFGCKVTYFGSDKKRFQIDIPESHTKKVTSEYQLEGTKKGAKPSKRYSTSRSRQLLAEMMKAESERAKVIQDLNRRIFQKFSEKREQWEQAIDCITVLDVLCSLAQYACNFGQDICIPEIEPMGNSDKIVIENGRHPCITNIDNFVPNDTKMGVADFANILLITGPNMGGKSTLMRQIAIICIMAHMGGYVPASGCTLSLIDRIFTRLGAHDDIVQGQSTFLVELSEAAVMLHHATPHSLVLLDELGRGTSTHDGNAIATAYVEKLTTINCRTLFSTHYHSLVDHFEARRDVQLGHMACMVENDDDPTEESVTFLYKMARGRCPKSYGFNVARLSGLKHCIVSRGREISKQLENESKSRQVFRDLFTSSVATIRSAMSKLSLS

SEQ ID NO: 4030 - DNA, 2745 bp, Prochlorococcus marinus str. MIT 9515
  CDS (1)..(2745): transl_table=11
atgcaagacgaaactataattcagaaagaattatttgcaatcaataatgaacttaaacttccaaagagctcgagtaaaatttctgataatttatcgactgaagaattaaaaaaagagtcacagagaaggccgagacaaagaaaaaatgccaccaatgtaattaacaaattcaagaatgagttacataataaaagcagggataattgcattaatgaaaaatctttcagttataaaacagttgaaaaagaaaaattaactccaattctcaagcattatgtaaaattaaaagaagaaaacagcgatagattgttgttatatagattaggtgacttttttgaatgtttttttgaagatgctgtacttatatctaacctattagaaataacattaaccagcaaagatgctgggaaagaaattgggaaaatccctatggcgggggtccctcatcacgcaatggagagatactgcgcagagttaattaaaaaaaataattcggttgttatttgcgatcagttagaaaaaagtactggaaattatggtacaccattaaaaagaggagtaacaagaataatcacccctggaactgtaattgaagaaggtatgctggttgcgaaaaaaaataattggataacagcaatccacttatcaaaaaatatttctgaaaatctagatgaatggggtatttcaagagcagatgtgagtacaggagagctattaacaatggaaggtaaatcacttccaaagttattcgatgaacttgttaagttagatacatcagagatcataattggaagcaatgaagagaaaagtttattagaagaacaaaatgaaaacatcacatataccgttacgcaagagacttttttcagtattaatgaagcaagttcaactataaaaaactatttccaaattctaagtctagaaggtctagggctcaaaaatttaaacaatgcgaccaaagcacttggtggcctactaaattatctagagaaaatcaatccttccaatttagagaacgattcttctctaagaatttctttagatttcccacaaatacaatttccaaaagatcatttaattattgattatcaaactcaaaaaaatttagaaataaaaaatacacaacgagaaaacaattatgcaggttcgcttctttggagtattgacaaaacatatacctgcatgggcgcaagatgtttaagaagatggatagattctccattattagatattgatgaaatttgtaaaagacaaaatattatttcaaactttttagagtctaaaaagttaagaatagatacccaaaatatacttagagcaatgggcgatttagagagactttcgggaagggcatgcgctggtcatgcaagtccaagagatttgatagcaatatctgaaggcttaaaaaaattacctaaattaaagtcaattgttaatttatttaagtataaaatcccatcttggacggatcaattaaagaatgttgataatgaacttctagaattagcagatctaataagtttcaaacttgtaggaaatccccctttaaatactagtgaaggcggaattatccatgatggagttgacaatgtactagatggcttacgtaatttaatcgacgattactcagattggttaaatgaagaagaattaaaagaaagaaaaattagtaaaatctcgaatttaaagattcaatttcataaaaactttggttattacatttcaataaacaaatcaaaagttaatttagcaccagaccattggattaaaaggcaaactcttactaatgaggagagatatgtaactacagaaataaaaaataaagaaagtaaaatatttcaagtaaaaaaccgggcagcggcaaaagagtatgaattattttgtgagataagaaatcttgtagcttcaaaaacaaaaaaaattagatccatcgcaaaatctatagcgtgtatagatgcattactcggtttatccattacatcattagagaataatttcataaaacctactcttttacccattcaaaattcaacgacccaacaaagtacagaaattattaaaggacggaatcccatcgttgaacaattattaactaataaagaatttatatctaatgatattttgtttaataataagcaaaaattaataatattaactggtccaaatgctagtggaaaaagctgctttattagacaaataggtttaattcaaattttatctcaaattggtagtttcatccctgcaagtaaagcaaatatacaaattgcggatcgaatatttacaagaattggagctgtagatgatcaatcttccgggcagtcaacattcatggtagaaatgtcagagacagcatcaatactaaaccaagcgacatcaaactctcttgttttacttgatgagatcggcagagggacatctacttttgacggattatccatagcgtggtcagtgagtgaatatcttgcaaaaaaaattgtatgtaataccatttttgctactcattaccatgaacttaattatcttaaaaatacaaataaaaatgtagaaaattttcaagtattagttaaacagaaaaaggatcaactatatttttgtcataaaataacaaaaggtggggcaaacaaaagttacggtattgaagctgcaaagttagctggggttcccaaagaagttatcgataaagctaaattagttttagattatttagaaaaaaataatcagttaaattctcaaatacaaatttaa

SEQ ID NO: 4031 - protein, 914 aa, Prochlorococcus marinus str. MIT 9515
MQDETIIQKELFAINNELKLPKSSSKISDNLSTEELKKESQRRPRQRKNATNVINKFKNELHNKSRDNCINEKSFSYKTVEKEKLTPILKHYVKLKEENSDRLLLYRLGDFFECFFEDAVLISNLLEITLTSKDAGKEIGKIPMAGVPHHAMERYCAELIKKNNSVVICDQLEKSTGNYGTPLKRGVTRIITPGTVIEEGMLVAKKNNWITAIHLSKNISENLDEWGISRADVSTGELLTMEGKSLPKLFDELVKLDTSEIIIGSNEEKSLLEEQNENITYTVTQETFFSINEASSTIKNYFQILSLEGLGLKNLNNATKALGGLLNYLEKINPSNLENDSSLRISLDFPQIQFPKDHLIIDYQTQKNLEIKNTQRENNYAGSLLWSIDKTYTCMGARCLRRWIDSPLLDIDEICKRQNIISNFLESKKLRIDTQNILRAMGDLERLSGRACAGHASPRDLIAISEGLKKLPKLKSIVNLFKYKIPSWTDQLKNVDNELLELADLISFKLVGNPPLNTSEGGIIHDGVDNVLDGLRNLIDDYSDWLNEEELKERKISKISNLKIQFHKNFGYYISINKSKVNLAPDHWIKRQTLTNEERYVTTEIKNKESKIFQVKNRAAAKEYELFCEIRNLVASKTKKIRSIAKSIACIDALLGLSITSLENNFIKPTLLPIQNSTTQQSTEIIKGRNPIVEQLLTNKEFISNDILFNNKQKLIILTGPNASGKSCFIRQIGLIQILSQIGSFIPASKANIQIADRIFTRIGAVDDQSSGQSTFMVEMSETASILNQATSNSLVLLDEIGRGTSTFDGLSIAWSVSEYLAKKIVCNTIFATHYHELNYLKNTNKNVENFQVLVKQKKDQLYFCHKITKGGANKSYGIEAAKLAGVPKEVIDKAKLVLDYLEKNNQLNSQIQI

SEQ ID NO: 4032 - DNA, 2766 bp, Xanthobacter autotrophicus Py2
  CDS (1)..(2766): transl_table=11
atgagctcagaccgcgcccggaccgccaccccagaccttccgcaggactcccccgagcccgccagcgtcgctcccgcccccgcgcgggcggaggaggcgcgtgtcacgcccatgatggcgcagtatctggagatcaaggcggccaatccggacagcctgctattttaccgcatgggcgatttctacgagctgttcttcgccgacgcggaagccgcctcgcaggcgctcggcatcgtgctgaccaagcgcggcaagcacctgggcgaggacattcccatgtgcggcgtgcccatcgaccgcgccgaggaatatctgcacaagctcatcgctctgggcttccgcgtgtcggtgtgcgagcagctggaggacccggcggaggcgaagaagcgcggaccgaaatccgtggtgcggcgggacgtgacccgcctcgtcacccccggcacgatcaccgaggacgcgctgctggatgcccggcgcgagaacgtgctggcggcgctcgcccgcgtgcgggccggatcggggccggaggatttcgcctacgcgctggcctataccgatatgtccaccggcagcttccgggtcaccgccaccgcgcgtgacgacctctccggcgacctcgcccgcctcgatccggcggagatcctggtctccgacgcggtgctggacgacggcgaactgcgcgcgctgctgcgggcctttccggcggtgacgcccctgccgcgccagtccttcgacggagcgggggcggaaaagcgcctcgccgatttcttcggcgtggcggcgctcgacgccttcggcaccttcgcccgcgccgagctgatcgcggcggcggccatcgtcgcctatgtggatcgcacccagctgggcgccaagccgctgctctcccgtccggtgaaggaagcggaaggcggcatcatggccatcgatgccggcacgcgggccaatctggagctggtgcgcaccacctccggcgagcggcgcggctccctgctcgccgccgtggatcgcacggtgacggcggccggcgcgcgcctcatcgcccgccgcatcgccgagccgcttacggaccttgccgccatccgtgcccggcacgacggcgtcgcccatctggtggaggagggggaattgcggcgcgagctgcgcgcccggctctcccgcgcccccgacatggcccgagcagtcacccgcctcgccctccagcgcggcggcccgcgcgaccttgctgccgtgcgcgatgcgctggacggtgccctcgccatcgccggcctgttcgccgccgcgccaccggcggaccttgcccgctcagcggcggcgctggcgcgggtgccccatgccctggtgctcgacctcgcctcggcgctcgccgagagcctgccgcccctccgtcgcgacggcggcttcatccgcgaaggctgcgacgccgagctggatgcgacgcgtgccctgcgcgacgagagccggcgcgtggtggcggcgctggagcggcgctacgtggacgagaccggcgtgcgcgccctgaagatccggcacaatgcggtgctcggctatttcgtcgaggtctccgcccagaacgccgaccgcctgcgcgaggcgccacacgacgccgttttcgtccaccgccagaccatggcgggggcggtgcgcttctcgtccgtcgagctgggcgatcttgagagccgtatcgccagcgccggcgagcgggcgctggggctggagcaggccatcttcgaccggctggctgccgccgtggtggccgagaccgagaccatccgcgccgccgcggaggcgctggcggaactcgatgtggctgcgggctttgcagagcttgcggcggtggagaaccatgtgcgcccgcacatggagccgggggtcgccttcgccatcgccggcgggcgccatccggtggtggagcaggccctcgccaaagagggcgggccgttcgtgcccaacgattgcgacctctccccgccggaggggttcgaggacgggcgcatcgtgctggtcaccgggccgaacatggccggcaagtccaccttcctgcgccagaacgcgctcatctgcgtgctggcgcaggccggcgccttcgtgcccgcccggtccgcgcgcattggcgtggtggaccgcctgttctcccgcgtgggcgcggcggatgacctcgcccgcgggcgttccaccttcatggtggagatggtggagaccgctgccatcctgaaccaggccaccgcccgctccctggtcatcctcgacgagatcgggcgcggcaccgccaccttcgacggcatgtccatcgcctgggcgagccttgagcacctgcacgaggtgaaccgctgccgggcgctgttcgccacacatttccacgaactgaccgccctgtcccagcgctgcaagcggctctccaacgccacggtgaaggtcaccgaatggcatggcgacgtgatcttcctgcatgaggtggtgccgggggcggcggatcgttcctacggcatccaggtggccaagctcgccggcctgccggaggcggtgatcacccgcgccaaggcggtgctggcggagctggaagcggccgagcgcgcctctccggcccagaagctcatcgatgatctgcccctgttcgcggtgcgcccgaagcctgcggccgccgcatcagcggacccgaaggccgaggcgacgctctccgccctcgacggcatcgaccccgacagcctgagcccgcgcgaggcgctggatgcgctctatcggctgaagggcctccggcgcgaggggtga

SEQ ID NO: 4033 - protein, 921 aa, Xanthobacter autotrophicus Py2
MSSDRARTATPDLPQDSPEPASVAPAPARAEEARVTPMMAQYLEIKAANPDSLLFYRMGDFYELFFADAEAASQALGIVLTKRGKHLGEDIPMCGVPIDRAEEYLHKLIALGFRVSVCEQLEDPAEAKKRGPKSVVRRDVTRLVTPGTITEDALLDARRENVLAALARVRAGSGPEDFAYALAYTDMSTGSFRVTATARDDLSGDLARLDPAEILVSDAVLDDGELRALLRAFPAVTPLPRQSFDGAGAEKRLADFFGVAALDAFGTFARAELIAAAAIVAYVDRTQLGAKPLLSRPVKEAEGGIMAIDAGTRANLELVRTTSGERRGSLLAAVDRTVTAAGARLIARRIAEPLTDLAAIRARHDGVAHLVEEGELRRELRARLSRAPDMARAVTRLALQRGGPRDLAAVRDALDGALAIAGLFAAAPPADLARSAAALARVPHALVLDLASALAESLPPLRRDGGFIREGCDAELDATRALRDESRRVVAALERRYVDETGVRALKIRHNAVLGYFVEVSAQNADRLREAPHDAVFVHRQTMAGAVRFSSVELGDLESRIASAGERALGLEQAIFDRLAAAVVAETETIRAAAEALAELDVAAGFAELAAVENHVRPHMEPGVAFAIAGGRHPVVEQALAKEGGPFVPNDCDLSPPEGFEDGRIVLVTGPNMAGKSTFLRQNALICVLAQAGAFVPARSARIGVVDRLFSRVGAADDLARGRSTFMVEMVETAAILNQATARSLVILDEIGRGTATFDGMSIAWASLEHLHEVNRCRALFATHFHELTALSQRCKRLSNATVKVTEWHGDVIFLHEVVPGAADRSYGIQVAKLAGLPEAVITRAKAVLAELEAAERASPAQKLIDDLPLFAVRPKPAAAASADPKAEATLSALDGIDPDSLSPREALDALYRLKGLRREG

SEQ ID NO: 4034 - DNA, 2742 bp, Prochlorococcus marinus str. MIT 9215
  CDS (1)..(2742): transl_table=11
atgcaagaaaataggataattcaaaaaaatttatttgcgattggaaatgaaaataatgagcaaaaagaaataacaaaaattccagaagatttatcttgggaagatttaaaaaaagagtcgcaaaaaagacctagacaaagaaaaaattcaacaaatttaataaataaattcaagactgatttaatttcaaataacaaaaatgtttgcatcaatgaagaatcttatagctataaaacagtttcaaaactgaaattaactcctgtaatgaagcattatgtaactctaaaagaggaaaataaagataggttattactttatagattaggggatttttttgaatgtttttttgaggacgctgtattaatatctaatcttttagaaataacacttaccagtaaagatgctggcaaagagattggcaagatccctatggcgggggttccccatcatgcaatggagagatactgtgctgatttaattaaaaaaaatcattctgtggttatatgcgaccaattagaaaaaagttctggaaattatgggactccaattaaaagaggaataacaagaataattactcctggaactgtaattgaagaggggatgttagtagcaaagaaaaataattggattactgctatttacttatcagaagaaaactcagatgaatcttatgaatgggggatatcaaaagctgatgtaagcacaggagaattaataactttacaggggcactctctatcaaaactatttgatgaaattattaaattagattcttcagaaatcattgtaggaagcaacgcagtaagagatttattaataagagaaaatagtcaaattacatatactgtttctcaagagactaattttggcattaatgaagcaaattatctaataaaaaattatttccaaattgcaaaccttgaaggaataggacttaaaaatttaaccaatgctactagatcacttggaggcttgttaaattatttggaaaaaattaatccttcaaatttagataaagattcttctgtaaaaatctcattagactttccacaaattcaatttggtcacaataaattaattattgattatcaaactcaaaaaaacttagaaatcaaaaatacacaacgagaaaacaattatgtaggttcgctactatggagtattgatagaacttatacctgcatgggtgcaaggtgtttaagaagatggatagattcaccactattaagcgttaatgatatttataaaagacaaaatatcattacaaactttattgaatctaaacaattacgtatagatacccaaaatttacttagagcaatgggggatttagaaagacttgcaggtagagcttgtgcaggtcatgcaagtccaagggacttaattgcaatagctgaaggtttaaaaaaattgcctagactaaaatccataattgaattatttagatatgatctcccagattggactgatcaattaaaaaatattgatgaaggactcttagaattggctgatattataagttttaaacttatagaaaatcctcctctaagtattagtgaaggaggcatgattcacgatggagttgacaatatattagatggtttacgcaacttaatggatgattactctgaatggctaaataaagaggaattaaaggaaaggaaaattagcaaaatttcgaacctgaaaattcaatttcataaaaattttggttactacatttctataaataaatcaaaagttaatttagctccacaacattggatcaaaaggcaaacgcttactaatgaagaaagatatatcacttcagaaattaaaaataaagaaaataagattttccaaataaaaagtagagcttcatcaagagaatatgaaattttctgcgaattaagaaatatagttgctgaaaaaacaaaacaaataagatcaatcgcaaaatccatcgcatctcttgatgcattgcttggtttatcaattacttcagtagaaaacaattttataaaaccttcattaataccaataaatgattcaacgacaaaaaatagtacaaaaattatcgcaggaagaaatccaattgtagagcaattgttaaatgacaaacagtttatagcaaacgatatctcttttgaggagaatcaaaaattaattatattaactggtcccaatgcaagcgggaaaagttgctttataagacaacttggtttaatacaaattcttgcacaaattggtagctttgttcctgctaataatgctgaaatcaagattgcagataggatttttacaagaattggggctgttgatgatcaatcatctgggcaatcaacatttatggtagaaatgtctgaaactgcatcaattcttaatcaggcaacttctagctcactagttttactcgatgagataggtagaggaacgtctacttttgatggactttcaatagcttggtcagtaagtgaatatcttgcaaaaataattcagtgtaatactatttttgcaacgcactatcatgagctgaattatttaaaaaattcaaataaaaatatacaaaattttcaggttttagtagaacaaaataacgatcagttaatttttagtcacaggattgttaaagggggctcaaataagagctatggtatagaagcagctaaattagcaggagttccaaaagaagttatagaaaaagcaaaatcagttttaaattctttagaagaaaataataaattaaattatgatattgcgtag

SEQ ID NO: 4035 - protein, 913 aa, Prochlorococcus marinus str. MIT 9215
MQENRIIQKNLFAIGNENNEQKEITKIPEDLSWEDLKKESQKRPRQRKNSTNLINKFKTDLISNNKNVCINEESYSYKTVSKLKLTPVMKHYVTLKEENKDRLLLYRLGDFFECFFEDAVLISNLLEITLTSKDAGKEIGKIPMAGVPHHAMERYCADLIKKNHSVVICDQLEKSSGNYGTPIKRGITRIITPGTVIEEGMLVAKKNNWITAIYLSEENSDESYEWGISKADVSTGELITLQGHSLSKLFDEIIKLDSSEIIVGSNAVRDLLIRENSQITYTVSQETNFGINEANYLIKNYFQIANLEGIGLKNLTNATRSLGGLLNYLEKINPSNLDKDSSVKISLDFPQIQFGHNKLIIDYQTQKNLEIKNTQRENNYVGSLLWSIDRTYTCMGARCLRRWIDSPLLSVNDIYKRQNIITNFIESKQLRIDTQNLLRAMGDLERLAGRACAGHASPRDLIAIAEGLKKLPRLKSIIELFRYDLPDWTDQLKNIDEGLLELADIISFKLIENPPLSISEGGMIHDGVDNILDGLRNLMDDYSEWLNKEELKERKISKISNLKIQFHKNFGYYISINKSKVNLAPQHWIKRQTLTNEERYITSEIKNKENKIFQIKSRASSREYEIFCELRNIVAEKTKQIRSIAKSIASLDALLGLSITSVENNFIKPSLIPINDSTTKNSTKIIAGRNPIVEQLLNDKQFIANDISFEENQKLIILTGPNASGKSCFIRQLGLIQILAQIGSFVPANNAEIKIADRIFTRIGAVDDQSSGQSTFMVEMSETASILNQATSSSLVLLDEIGRGTSTFDGLSIAWSVSEYLAKIIQCNTIFATHYHELNYLKNSNKNIQNFQVLVEQNNDQLIFSHRIVKGGSNKSYGIEAAKLAGVPKEVIEKAKSVLNSLEENNKLNYDIA

SEQ ID NO: 4036 - DNA, 2646 bp, Synechococcus sp. PCC 7002
  CDS (1)..(2646): transl_table=11
atgcctgctgccaaccgtaaccccagcgccgaagacattcccaacgcagattatcgccagctcgatcgggaactcctcacaccgatgatgcagcactacgcagaccttaaggataagtatcccaacaatatcttgctctaccgggtcggcgactttttcgagtgctttttcatggatgcgatcaccgtttctcgcgaattggagttggtctgcaccagcaaagaatccggcaaaggcattggccgcgtaccgatgacaggggtgccccaccatgccctcgaacgttacagcacccagcttttagaaaaaggctatggggtcgtcatttgtgaccaagtagaagatgccgccaccgcccacgccgaaaaacgaatggtgcggcgggaagtgcaaaaggtcttgaccccaggcaccctcaccgatgatgggatgttgcgggcgcggcaaaataattatcttgcggcggtggtgattgcgggcaaccattggggtttggcctatgctgacatctccaccggggaattttgtacgacccaggcccaggatttagcggcgttaaacctcgaactcctgcgcttgcaaccttcggaagtactctatcccaccgatgcaccggatttaaaccgtttgatgcggccaggcgatcgccaaacattattacaaaaccacctgcccgcttgtctgccgtcggacttttgttatgcgctgcgatcgccccgggaatttgatctcaatgaggcgaaacccaagcttttgatgactttccagtggcgttctctggagggggtcggctgcgaacatttacccctggcggtgcgggcagcggggggactcttggcctatgtggaggaaacccagcaggcctacaaagtgccctttgaaagcctcaaaacctacagcatcgatgcctttttgcaactggatcaccagacgaggcgcaacctagaaattacccagacggtgcgggacggcagtttttacggctccctactctgggcgctggatgtaacctgtaccaacatggggggccgcgccctgcggcggtggttgttgcaacctttattagatccaaaggcgatcgccaagcgattagattccgtcgcagaactggtagaaaatacaaatctccgccaagatatccggcaattgctgaagcaaatttacgatttagagcgaattgctgggagaatcggctctggtagtgcgaatgcccgcgatttatacgctttagcggaatctttaacgaaattaacctatctcgcggaattggccaccgaggggcgatctccttatctccaggcagtgaaagattttccgccggaattagaagccctgggacagcacgttttgcaatacctggtggattcgccgccgattcacatcaaagaaggggggttaatccgggatggggttgatgaaaacctcgattttctgcgtcgctcccaagtggaagaccgggaatggttggcgaatttagaagttactgaacgggaacggacgggggtcagcaagctcaaagtcggctataacaagaccttcggctattacattagtttgccccgctcccaggcggacaaggctcccgacgaatatctacgcaaacagaccctcgctaacgaagaacgctacatcaccccggaactaaaagaacgggaaagccgtatcctcactgctaaggacgacatttgcagcctggaatacgaaattttcaccaccctccgcgccgaggtcgctgaacataccgaccaaattcgcaccaccgccaaggcgatcgccgccctggatgtattgacgagcttcgcggaaactgccgtgtaccaagggtattgccgtccagagattaccaccgaaaaaaccctagaaattgaagctggtcgtcaccccgttgtcgaaaagtccttgggcatgggtctgtttgtgcccaactccacctacctcggccgcactcagaattcctatcctgatttgattatcctcacgggccccaatgccagcggcaaaagttgttatctccggcaaacgggcttgattcaactgatggcccaggtgggtagttttgtccccgcccaaagtgctgtaattcccatttgcgatcgcatttttactagggtcggcgctgtcgatgacctggctacgggccaatccacgtttatggtggagatgaatgaaaccgccaatatcctcaaccatgccacggaaaaatctttggttttaatcgacgaaattggccggggaactgcaacttttgatggcctttccatcgcctggtcagtatcagaatacctcgccacagaaatcaaagcgaaaacaatttttgcgacccattatcacgagttaaatgagttggcttcattattagaaaatgtcgccaattatcaagtaacggttcaagaaatgcccgaagaaattatcttcttgcaccaagttcgccccggtggcgctgaccgttcctacgggattgaagctggtcgtttagccggtttacccaagagcgtcattcaacgggcaaaacaagtcatgacccaaattgaaaagcatagtaaaattgccgtcggcctacgcaaaggcatccccaagaaaataaccactaccacgccagaagatccccaaagggtgtcggaacaattaaatattttcaaagtttaa

SEQ ID NO: 4037 - protein, 881 aa, Synechococcus sp. PCC 7002
MPAANRNPSAEDIPNADYRQLDRELLTPMMQHYADLKDKYPNNILLYRVGDFFECFFMDAITVSRELELVCTSKESGKGIGRVPMTGVPHHALERYSTQLLEKGYGVVICDQVEDAATAHAEKRMVRREVQKVLTPGTLTDDGMLRARQNNYLAAVVIAGNHWGLAYADISTGEFCTTQAQDLAALNLELLRLQPSEVLYPTDAPDLNRLMRPGDRQTLLQNHLPACLPSDFCYALRSPREFDLNEAKPKLLMTFQWRSLEGVGCEHLPLAVRAAGGLLAYVEETQQAYKVPFESLKTYSIDAFLQLDHQTRRNLEITQTVRDGSFYGSLLWALDVTCTNMGGRALRRWLLQPLLDPKAIAKRLDSVAELVENTNLRQDIRQLLKQIYDLERIAGRIGSGSANARDLYALAESLTKLTYLAELATEGRSPYLQAVKDFPPELEALGQHVLQYLVDSPPIHIKEGGLIRDGVDENLDFLRRSQVEDREWLANLEVTERERTGVSKLKVGYNKTFGYYISLPRSQADKAPDEYLRKQTLANEERYITPELKERESRILTAKDDICSLEYEIFTTLRAEVAEHTDQIRTTAKAIAALDVLTSFAETAVYQGYCRPEITTEKTLEIEAGRHPVVEKSLGMGLFVPNSTYLGRTQNSYPDLIILTGPNASGKSCYLRQTGLIQLMAQVGSFVPAQSAVIPICDRIFTRVGAVDDLATGQSTFMVEMNETANILNHATEKSLVLIDEIGRGTATFDGLSIAWSVSEYLATEIKAKTIFATHYHELNELASLLENVANYQVTVQEMPEEIIFLHQVRPGGADRSYGIEAGRLAGLPKSVIQRAKQVMTQIEKHSKIAVGLRKGIPKKITTTTPEDPQRVSEQLNIFKV

SEQ ID NO: 4038 - DNA, 2382 bp, Thermotoga sp. RQ2
  CDS (1)..(2382): transl_table=11
gtgaaggtaactcccctcatggaacagtacctgagaataaaagaacagtacaaagattccattctgctgtttcgtctgggagatttttacgaggcgtttttcgaagacgcaaagatcgtttcaaaggttctgaacatagttctcacaagaaggcaggacgctcccatggcgggcattccgtaccacgcgctgaacacctacctgaaaaagctcgtcgaagcgggctacaaggtggcaatctgcgatcaaatggaagaaccttcgaagtcgaagaaattgatcagaagggaagtcacgcgcgttgtcactcctggctctatcgtagaggatgagtttctcagcgaaacgaacaactacatggccgttgtttcagaagagaagggaaggtactgtacggttttctgtgatgtctcgacaggtgaggtcctggttcatgaaagttcagacgaacaggaaacgttggacctgctgaagaattactccatttcccagatcgtttgttcagagcacctgaaatcttctttgagggaacgctttccaggtgtttacacagaatccataagcgagtggtatttctccgatctggaagaagtggaaaaagcctacaatctgaaagacattcatcatttcgagctttcaccccttgcgctgaagacccttgcagcacttataaagtatgtcaagtacacgatgatcacggaagatctgaatctgaaaccccctcttctcatctcccagagagactacatgatactcgattccgcaacggtggaaaatctttctttgattcccggtgacaggggaaagaatcttttcgatgtgctgaacaacacggaaactcctatgggggctcgtcttttgaaaaagtggattctccaccctctggtcgacagaaagcagatcgaagaaaggctcgaggctgtggaaagactggtgaacgacagggtgagcctggaggagatgaggaactttctttcgaacgtgagggatgtggagcggatcgtttcgcgggtggaatacaacagatccgttcccagggacttagtggcactcagagagacactggagatcattccgaaactgaacgaaattctttcaaacttcggtgtgttcaataaactcgctttcccggaagaactggttgatctgcttcgaagagccatcgaagatgatccgctgggaagccccggcgagggaaaggttataaagagaggattctcacctgaactcgatgaatacagggatcttctggaacatgccgaagagaggctcaaagagttcgaagagaaggagagagaaagaacgggtatccaaaaactgcgggttggatacaaccaggtctttggttactacatagaggtgacgaaagcgaatctggacaagattcccgatgattacgaaagaaaacaaacactcgtcaattctgaaagattcatcacacctgaattgaaggaattcgagacaaagataatggccgctaaagagaggatagaagaaatggaaaaggaactcttcaaaagcgtgtgtgaggaggtgaaaaagcacaaagaagttctcctcaagctctcagaggatctggcaaagatggatgtgctttcgacattggcctacgatgctatcctgtacaactacacaaaacccgtcttttcagaagacagactggagatcaaaggtggaagacacccggtcgttgaaaggttcacacagaattttgttgaaaacgatatttacatggacaacgagaagagatttgtggtaataacgggtcccaacatgagcgggaagtccactttcatcagacaggtgggtctcatatccctcatggcgcagataggatcgtttgtgccggcgcagaaggcgattcttcccgtgttcgacaggattttcacgcgaatgggtgccagagacgatctcgctggtggtagaagtacgttccttgtcgagatgaacgagatggcactcatcctgctgaaatcaacggaaaagagcctggttctcttggacgaggtgggaagaggtacgagcacccaggacggcgtcagcatagcctgggcaatctcagaggaactcataaagagaggatgtaaggtgctgtttgccactcacttcacagaactcaccgaactcgaaaaacactttccgcaggtccagaacaaaaccattctggtaaaagaagaaggcaaaaacgtgatattcacccacaaggtggtggacggtgtggcagacagaagttacggaatagaggtcgcaaagatagcgggtatccccgacagggtcataaacagagcttatgaaattctggagaggaatttcaaaaaccacacgaagaaaaacggaaaatcgaacagattcagtcagcagattcctctctttcctgtttga

SEQ ID NO: 4039 - protein, 793 aa, Thermotoga sp. RQ2
MKVTPLMEQYLRIKEQYKDSILLFRLGDFYEAFFEDAKIVSKVLNIVLTRRQDAPMAGIPYHALNTYLKKLVEAGYKVAICDQMEEPSKSKKLIRREVTRVVTPGSIVEDEFLSETNNYMAVVSEEKGRYCTVFCDVSTGEVLVHESSDEQETLDLLKNYSISQIVCSEHLKSSLRERFPGVYTESISEWYFSDLEEVEKAYNLKDIHHFELSPLALKTLAALIKYVKYTMITEDLNLKPPLLISQRDYMILDSATVENLSLIPGDRGKNLFDVLNNTETPMGARLLKKWILHPLVDRKQIEERLEAVERLVNDRVSLEEMRNFLSNVRDVERIVSRVEYNRSVPRDLVALRETLEIIPKLNEILSNFGVFNKLAFPEELVDLLRRAIEDDPLGSPGEGKVIKRGFSPELDEYRDLLEHAEERLKEFEEKERERTGIQKLRVGYNQVFGYYIEVTKANLDKIPDDYERKQTLVNSERFITPELKEFETKIMAAKERIEEMEKELFKSVCEEVKKHKEVLLKLSEDLAKMDVLSTLAYDAILYNYTKPVFSEDRLEIKGGRHPVVERFTQNFVENDIYMDNEKRFVVITGPNMSGKSTFIRQVGLISLMAQIGSFVPAQKAILPVFDRIFTRMGARDDLAGGRSTFLVEMNEMALILLKSTEKSLVLLDEVGRGTSTQDGVSIAWAISEELIKRGCKVLFATHFTELTELEKHFPQVQNKTILVKEEGKNVIFTHKVVDGVADRSYGIEVAKIAGIPDRVINRAYEILERNFKNHTKKNGKSNRFSQQIPLFPV

SEQ ID NO: 4040 - DNA, 2679 bp, Nostoc punctiforme PCC 73102 (Nostoc punctiforme ATCC 29133)
  CDS (1)..(2679): transl_table=11
atgaccgcctctcactctgaaactccatctaccaaacccgacgcgagtacttttatttctgaccatctacaggtggatcgaagtaagctaagtcaaatgtacttgcactatgtcgagacgaaggataaatatcctcacgcggtattgctgtatcgggtaggagatttctttgaatgctatttccaagatgctgtaaaactagcgcaagaattggaattagttctcactagtaaacaagctggcgaacagggacgggtggcgatgtctggtgttccgcatcacgcttgggaacgctacgcgacgctgctagtagaaaagggttatgcagtcgtaatttgcgaccaagtagaagatgcttcggaagctgctggtagattggtgcggcgggaagtaacgcgcattcttaccccaggcactttgctggaagaaggaatgctgaaatccagtcgcaataattaccttgcagcagtggtaattgccgcaaatcattggggtttagcttatgcagacatctctacaggcgaatttctcacgactcaaggtagtgatttagaacatctgacacaggaattaatgcgcttgcaaccttcagaggtgttagttccaacaaatgcgcctgatttaggtagtttgctgcgtccgggagaaacttcgcctcatctaccggagtgtttgccaccatcattttgctatagtttgcgatcgcaagttccattttctcaaggcgaagctagacctcgattattgcagaaatttaaggtgcgatcgctcgaaggactcggttgcgatcgttttcccctcgctgttcgtgcggctggcggtcttttagaatacctggaagatacccaaaaggaaaacccagttccccttcagagactccgcacctacactgtcaccgattacctaattgttgatagtcaaacccgccgtaacctggaaattacccaaaccgtccgggatggaacttttcatggttccctactctggtcattggatagaactagtacagctatgggtgggcgggctttacggcggtggttattgcaaccactactcgatattaaaggcattcgggcgcggcaagatactatccaagaattgatggaaaatacacccctgcgtcaagatttacggcagttgttacgccaaatttatgacctagaacgcctcactggaagggcaggttctggtacagccaatgctagagatttagtagctttggcagattccctctcacgtttaccagaattatcgcacttagtaactgaatcacattctccattcctcaaagctctgcagaaagtcccaagtgtgttggaagaattagcacaaaagttacacgcgcaccttgtggagtcgccacccatactaatcaaagaaggcggattaattcgtcctagcgtcaatcctcttttggatgagagaaaagcaactgtagaagcagaccagcaatggattgccaacttagaagttgatgagagggctaagacgggaatttcgacattaaaggtaggattcaacaaaacttttggctattacatcagtatttctcgtaccaaagctgaccaagtacctgctaattacatccgcaagcaaaccctgaccaatgaggaacgttatatcaccccagatttgaaggaacgagaagcccggattctctcggcgcgggatgatttaaatcagttggaatatgaaatttttacggcgttgcgggaagaggtagcacaagaagcggaagtaattcgcaatctatctcgtgcagtggcggcggcagatgtattgtgtggtttggctgagttggcagtgcatcaaggttactgtcgtccagaaatgttgtcgggaagggaaataaacattgttgatggccgtcatccggtggtggaacagtctttacctgcgggtttctttgtgccgaattcgactcaattaggtcaagagtcattagtcagtagtcatctgtcattagcagataatcaagaacaaataacaaatacttctctacgagaggctgcgccaacgactacgctcagtacaagtgaccaaggacaaatgaccaatgacaatcccgatttgattatcctcaccgggccaaatgctagcggcaaaagttgttatttgcgtcaggtgggattgattcagttaatggcgcagattggtagttttgtaccagctagattggccaaattgggaatatgcgatcgcatttttacccgtgtaggtgcagtagacgatttagcaactggtcaatctaccttcatggtggaaatgaatgaaacggcgaatattctcaaccatgctacatctaggtcgctggtattattagatgaaattggccggggaacagcaacatttgatgggctttccatcgcttgggcagtggcggaatatatcgcagtggatattcgggcgcgaacgatttttgcgactcattaccatgaattgaatgagctagctagcattgtaccgaatgtggctaattatcaagtgacagtgaaagaattacccgaccaaattatctttttacaccaagtccaaccaggaggcgcagataagtcttacggtattgaagcgggaagattagcgggtttaccagcagtggtgattcaacgagccaaacaagtgatggggcaaattgagaaacatagtaagattgcgatggggctgcaaaatctggattga

SEQ ID NO: 4041 - protein, 892 aa, Nostoc punctiforme PCC 73102 (Nostoc punctiforme ATCC 29133)
MTASHSETPSTKPDASTFISDHLQVDRSKLSQMYLHYVETKDKYPHAVLLYRVGDFFECYFQDAVKLAQELELVLTSKQAGEQGRVAMSGVPHHAWERYATLLVEKGYAVVICDQVEDASEAAGRLVRREVTRILTPGTLLEEGMLKSSRNNYLAAVVIAANHWGLAYADISTGEFLTTQGSDLEHLTQELMRLQPSEVLVPTNAPDLGSLLRPGETSPHLPECLPPSFCYSLRSQVPFSQGEARPRLLQKFKVRSLEGLGCDRFPLAVRAAGGLLEYLEDTQKENPVPLQRLRTYTVTDYLIVDSQTRRNLEITQTVRDGTFHGSLLWSLDRTSTAMGGRALRRWLLQPLLDIKGIRARQDTIQELMENTPLRQDLRQLLRQIYDLERLTGRAGSGTANARDLVALADSLSRLPELSHLVTESHSPFLKALQKVPSVLEELAQKLHAHLVESPPILIKEGGLIRPSVNPLLDERKATVEADQQWIANLEVDERAKTGISTLKVGFNKTFGYYISISRTKADQVPANYIRKQTLTNEERYITPDLKEREARILSARDDLNQLEYEIFTALREEVAQEAEVIRNLSRAVAAADVLCGLAELAVHQGYCRPEMLSGREINIVDGRHPVVEQSLPAGFFVPNSTQLGQESLVSSHLSLADNQEQITNTSLREAAPTTTLSTSDQGQMTNDNPDLIILTGPNASGKSCYLRQVGLIQLMAQIGSFVPARLAKLGICDRIFTRVGAVDDLATGQSTFMVEMNETANILNHATSRSLVLLDEIGRGTATFDGLSIAWAVAEYIAVDIRARTIFATHYHELNELASIVPNVANYQVTVKELPDQIIFLHQVQPGGADKSYGIEAGRLAGLPAVVIQRAKQVMGQIEKHSKIAMGLQNLD

SEQ ID NO: 4042 - DNA, 2502 bp, Wolbachia pipientis
  CDS (1)..(2502): transl_table=11
atgaacttaataagagaaaaaaatacccctgtaatggagcaatatttaaatttgaaagctcaatacacggatcatctattgttttatagactggacgatttttatgaattgtttttcgatgatgctattaaagctgcgaaattgctgaatatagtgctaaccaagaggggcaattcaaatgggcaagaaataccaatgtgtggagtgccagcacacagtagcgaatcttacctacacaagctaatagatttaggattcaaagtagcaatctgtgaccaattagaaactgctgatgaagcaaaaaagaggggctataaatccatagtaaagcgtgatgtagtgcgagttgtaactccaggtacaattatagaagattcactactggaggataaaagcaataattatctcgcatccatagttgaacaaaatgacgaatatgctatgagttggcttgaattatcgacgggaaaattttttcacactttaacgagtttgaaagctctagatagtgatttattgcgtatatcaccaagagaattattaatttctgaaaaattcactgaggatgaaaaaattagatcgattttaaaaaattataaaatatcaattacgcaacacgcacagagcttttttgagtatagtaaatctcacagaacattatgcgagttttataaaatcagggaacttgggagtataggaaatttcagcaaagtagaaatcatggcgtgtggtgcactgcttgaatatgtcagagtaacgcaaaggggctccattccaaggcttgaattcccaaaaacctataagcaacaaaatttcatgcttattgatgcttcagcaaggagaaatcttgagttgttttcaactcaatttggtgaaaagaaaggttcactaatttcagttattgatcatacagttacagcttctggtggacgcctgctcaaacaaatgctcgcttcaccccttgcttgctctaaggcaattaatttgaggctcagcaccgctcaattttttgtaaataatcatgattcacgcagaaaaatacgagagatattatctaacattccggatattgaaaggtctttatcgcgcttaatactagggcgtggttcaccaaaggatatgaacctattgaaaataggcctaggaaagactttagaattgtctgagtttctgtctaccttgcataattattgtttaagtgaaaaatcagaaattaactctcagatgtcattccagtgcttgaccagagaaaaggaaccagttcaggtgataagtagtgacgagagtgaactaagcacaatacataaaagtcttggtaatcataaagatctattcgagcttctaaacagcgctatacttgataacaacctcagttccgtaaaagaaggaggatttatcaatccaaaatacaactcagaattatctgagttatcttatatattgaacaacagtaacaagttggtaactaagctccgtgaatcttatcgcgacctaactggcattgctgcactcaaaatattacacaacaatatacttggttattacgttgaagtgtcggcaaatcacaaaataacttcggatatatttattcatagacaaagcttagcaaatagcatgcgctacactactaatgaattgaaagaactagaaaataaaattcttacggcacgtgatgctgcaatcggcttagaaatgaaaatttttagtgaactgtgtagtgaagtcgctaaagaatctgaaaaaattgctcttgctgcaaatgctttggcaaaacttgatattagaactgcatttgcagagcttgcagtgcaaaataattacgtaaaacccattattgatgacagcaaagagttcaatatctgtagcggaagacacccagtggttgaagttaacgataaattcattgcaaatagcatcaatttagctggtatacatctaattactggtcctaatatggctggaaaaagcactttcttgaggcaaaacgctctcattgcagttttagctcacatggggtcatttgtgccagcagagagtgcgcatgtaggagtgattgacaagatattcagcagggttggcgcaacggataatataacagctggttattctaccttcatggtagagatgatcgaaacagcaacgatagtaaatcaggcaacggaccgttccttggtgatacttgatgaaattggtaggggcacaggggtgtatgatggattatctattgcacaggcggtgattgaacatattcacaatgtaaataagtgccgcgccatttttgcaactcattatcatgaattgactaaagtaggtgaatacttagaaaatgtgaaatgtttttgtatgaaaataaaagaatggaaaggagaagtcatctttttacatgaagtaattgaaggcattgcagatgagtcatatggaatacatgtagcaaaacttgctggttttcctgattctgttttaaacagagcaagagaagtatttgaggagctaaaggcttga

SEQ ID NO: 4043 - protein, 833 aa, Wolbachia pipientis
MNLIREKNTPVMEQYLNLKAQYTDHLLFYRLDDFYELFFDDAIKAAKLLNIVLTKRGNSNGQEIPMCGVPAHSSESYLHKLIDLGFKVAICDQLETADEAKKRGYKSIVKRDVVRVVTPGTIIEDSLLEDKSNNYLASIVEQNDEYAMSWLELSTGKFFHTLTSLKALDSDLLRISPRELLISEKFTEDEKIRSILKNYKISITQHAQSFFEYSKSHRTLCEFYKIRELGSIGNFSKVEIMACGALLEYVRVTQRGSIPRLEFPKTYKQQNFMLIDASARRNLELFSTQFGEKKGSLISVIDHTVTASGGRLLKQMLASPLACSKAINLRLSTAQFFVNNHDSRRKIREILSNIPDIERSLSRLILGRGSPKDMNLLKIGLGKTLELSEFLSTLHNYCLSEKSEINSQMSFQCLTREKEPVQVISSDESELSTIHKSLGNHKDLFELLNSAILDNNLSSVKEGGFINPKYNSELSELSYILNNSNKLVTKLRESYRDLTGIAALKILHNNILGYYVEVSANHKITSDIFIHRQSLANSMRYTTNELKELENKILTARDAAIGLEMKIFSELCSEVAKESEKIALAANALAKLDIRTAFAELAVQNNYVKPIIDDSKEFNICSGRHPVVEVNDKFIANSINLAGIHLITGPNMAGKSTFLRQNALIAVLAHMGSFVPAESAHVGVIDKIFSRVGATDNITAGYSTFMVEMIETATIVNQATDRSLVILDEIGRGTGVYDGLSIAQAVIEHIHNVNKCRAIFATHYHELTKVGEYLENVKCFCMKIKEWKGEVIFLHEVIEGIADESYGIHVAKLAGFPDSVLNRAREVFEELKA

SEQ ID NO: 4044 - DNA, 2628 bp, Prosthecochloris aestuarii DSM 271
  CDS (1)..(2628): transl_table=11
atgggccgaaaacccggcattaaacgctctggggaagcaactcccatgatgcgtcagtatctggaagtcaaggaacgctatcctgattttcttctgctgtttcgtgtgggtgatttttacgagtctttttacgacgatgcccgccaggtgtctgaagcactcaatatcgttctgacccggcgttcaaacggcgcggcttccgatattgccatggccgggtttcctcatcattcctgtgagggttacatcgctaaactggtgaggaaagggttcaaggttgccgtttgcgatcaggtcgaagatccttccgaggccaaaggcattgtgaggcgggagattaccgatatcgttacgcccggcgtcacctacagcgacaagattcttgacgacaggcacaataattatctctctgcgatcagttttctgaaaaaaggacgccaacagcgtgctggaattgcttttatcgatgtgacgacagccgagttcagggttgccgatgtcgaagttgaccagctcaaggatatgctccaatccgttcagccggcagaggttcttctctcttcaaggaatcgcgagtacgctgatgagatcaaaaaaatacttcctccgggagtactggtttcgcttcaggatgactggatgttcagccaggagaatgctgagcagatactgctgcgccatttcaaaacccattcactcaaaggattcggcatcgaacatgcctatgcggccaggatagcggcaggggtcattctgcattatcttgaggagacccagcagaacaaactgcagtatattacccgcattgcgaccgttgacagccatgagtatatgactctggatcttcagaccaggcgcaacctcgagattattttctcgatgcatgacggatcgatgaacggaagtcttctgcatgtgatcgaccggacacgatgccctatgggggccaggcagctccgacggtggctgctgcatccgctgaagcagatggcgcccatattgcaacgccatgatgccgttgatgaactctcccgacatcccgatgtgcgtcgtgagctcggagaggtgatcgggagtattcatgatcttgagcgtgcgttatcgcggatcgcaaccctgcgctctatgccgagagaggtcagaatgctcggctctgccctggagcagcttccccgtctgcagggccttttcgatcaatcggaaagttcacggctctgttttctttccaggaggctttcgatgcttcccgagcttgcccggagaatcgatgaggccattgatccggatgcaggagcgacgatgcgcgatggaggctacattcgtgagggctataatgctgagcttgattcattgcgttcgctctcttcaacggcaaaggagcgtcttctggaaattcagcagcaggagcgagccgcaaccactatttccacgctcaaggtccagtataataaggtctttggatactatatcgaggtgagccgggctaacagtgacaaggtccccgcctattatgaaaaaaaacagaccctggtcaatgccgagcgatatacgattcctgcactgaaagaatatgaggaaaccattcttactgcggaggaaaaaagtctttcgctcgaacagcgacttttcagggagctctgtcaggcaatagcctcagaagccggccagatacaaacgaacgctgaaagtatagcggagcttgattgcctctgttctttcgcggtgaatgccgatgagtatcgctattgtaaacccgttatggttgaagaaccggtgcttcgcatacagaacggacgtcatccggtcctggaacgcattgtcgatgttgacgagccttatgtctcaaatgattgtctgtttgacgagcgacagcgcatgcttatcgttacgggtccgaatatggcaggcaaaagctcgtatcttcgccagatcggcctcatttccctgcttgcccaggtggggagtttcgttcctgccgacgaggctgaaataggccttgtcgatcggatctttacccgtgtcggagcatcggacaatcttgcttccggtgagagtacctttatggtcgagatgaatgaggcggccagtatcctcaacaatgcgaccaggagcagtctcattctgcttgacgaggtcggcaggggaacgagtacctatgacggtatgtcgattgcctgggcgatgagtgagtacattcattccgctataggtgcaaggacactttttgcaacgcattaccacgagcttgccgaactcgaggagcgattggatggcgttttcaattataatgccacggtgaccgagacagctgatcgggttgtttttctgcgcaaaattgtcaggggcgcgtccgataacagctatggaatcgaagtggccagaatggcaggaatgccttccggggtgattcagcgagccaaagagattctttcgggtatggagggccgggaaatagagatgcccgatcgtttgaaaggttgcgggcgaaccaatcagatctatctgttcgaggaggaggagcgtgcgcttaaacgtgcggttcagagtatagatatcaatagtcttacccctatcgaggccatgatggaactcaaaagacttcaggatcttgccgccggggggggttaa

SEQ ID NO: 4045 - protein, 875 aa, Prosthecochloris aestuarii DSM 271
MGRKPGIKRSGEATPMMRQYLEVKERYPDFLLLFRVGDFYESFYDDARQVSEALNIVLTRRSNGAASDIAMAGFPHHSCEGYIAKLVRKGFKVAVCDQVEDPSEAKGIVRREITDIVTPGVTYSDKILDDRHNNYLSAISFLKKGRQQRAGIAFIDVTTAEFRVADVEVDQLKDMLQSVQPAEVLLSSRNREYADEIKKILPPGVLVSLQDDWMFSQENAEQILLRHFKTHSLKGFGIEHAYAARIAAGVILHYLEETQQNKLQYITRIATVDSHEYMTLDLQTRRNLEIIFSMHDGSMNGSLLHVIDRTRCPMGARQLRRWLLHPLKQMAPILQRHDAVDELSRHPDVRRELGEVIGSIHDLERALSRIATLRSMPREVRMLGSALEQLPRLQGLFDQSESSRLCFLSRRLSMLPELARRIDEAIDPDAGATMRDGGYIREGYNAELDSLRSLSSTAKERLLEIQQQERAATTISTLKVQYNKVFGYYIEVSRANSDKVPAYYEKKQTLVNAERYTIPALKEYEETILTAEEKSLSLEQRLFRELCQAIASEAGQIQTNAESIAELDCLCSFAVNADEYRYCKPVMVEEPVLRIQNGRHPVLERIVDVDEPYVSNDCLFDERQRMLIVTGPNMAGKSSYLRQIGLISLLAQVGSFVPADEAEIGLVDRIFTRVGASDNLASGESTFMVEMNEAASILNNATRSSLILLDEVGRGTSTYDGMSIAWAMSEYIHSAIGARTLFATHYHELAELEERLDGVFNYNATVTETADRVVFLRKIVRGASDNSYGIEVARMAGMPSGVIQRAKEILSGMEGREIEMPDRLKGCGRTNQIYLFEEEERALKRAVQSIDINSLTPIEAMMELKRLQDLAAGGG

SEQ ID NO: 4046 - DNA, 2460 bp, Anaplasma marginale str. St. Maries
  CDS (1)..(2460): transl_table=11
atggttaaggcaagcgacaatacggaatatactcccataatcaggcagtataagtcactaaaagaccaatatgaggggtgtttgctgttttacaggcttggggacttttacgagctttttttcgacgatgcggttgtggcatctagggctttggatatagtgttaaccaagaggggcgctggaacccctatgtgcggtatacccacgcacagtgcagacagctatttgggaaggttagtaaaacttggccacaaggttgccatatgtgagcaacttgagacggtggaggaagcgcgtaagaggggacatcgggccctggttaaacgagatgtagttaggatagtaacgcccggcactttgcttgaagacgggttgctggaagcgagtgagaacaactatctggcgtgcctttcgcgtgtgggagatagctacggtgtggcgtggatggacctatctgcaggaatattcaacgtgcgttctagtagactggagaacattgacagcgagatacagcgcatacgtcccagggaattgctgatttccgatcgactgaaagagcaaagggaaattgaactgattttgcgtaggcatcggtgcgcagttaccagccatagcgagagtttcttcgatgtcaaaaaagcagaaaaggtcttgtgtgggatatatggagtgaataccctgcggggactaggaaattttacagatgtggaggtgtctgcatgtggctctttggttgagtacgtgcgcacaacgcagaagaataaccttccgaagttaggctatccgaaagtgtgcgatagcaaaagctttgtactcatagacggtgcagcgctgcggaaccttgagttgttttgcacccagtctggggagaaagagggggccttggtatccgtcatagatagaaccgtgactgcgataggaagcaggctcctaaagcgacatcttgcgtttccatcctcctgcccacacgtcataaatagcagacaggatgctgtggagtttttcgtaaaaagccgaaatatatgtgagagcataagagatgtcatgcgtgggatccctgatatggaacgtatcctgactcggatcaagctgcttaaatgctcgccgcgggatgtttgcatgttaggaaaggccctcgcaaagattctgcgactgcagcagatcatgctagaagtggacaatcctatgttggtcaggattgttggtgagtttggtgagcatgagaagctgctgaagttaataagcggcaccatacttgaaaataatgcagcaaacgccagagatggtgggtttataaatcctgcatgcaatgcgcgtctagccacggttgtgcgcattgaaagtgaaagtgataaactcatgcaggacctgcgtgataagtaccgtaagcttactgggataggcagcctcaagattgcgtacaacagcgtgctcgggtattacatagaaacccctgcttcgcataaacttaaagatacaatcttcatacacaggcagagcctggcacatacgatgcgccataccaccgcggagcttagggaacttgaggagacaatcaccgctgccaaaagtgagattatggagcttgaggctcagattttccgcggactttgtctacgaatttcggaggaggcgcaaagcgtcgaacttgcggccaatgcggttgcggagctggatgttttgatttcacttgccaggttggcggtggagaacaaatatgtcaggcctattgttgatgatagcagagagttcgcagtaaaaagagggcgccatcccgtggttgagacgggtgtgcggttcattgccaatgatgtcaacctctcggaagatggcaggatgtggctcattacagggccaaacatggccgggaagagcactttcctcaggcagaatgcactcatagcgattttggcgcacatcgggtcattcgtgccggcggagagtgcgcatataggggttatagataaaattttcagcagggtaggggcttcggacagcatatcgttgggatattccacatttatggtagaaatggctgagaccgcggctatcctaaaccaagcaaccgataggtctttggtaattctggacgaagttggtagaggcacggggatccacgacggattttccatagctctggcggttatagagcatattcacgacgttacgaagagcagagctatatgtgccacgcattatcacgaactgccgaaatttagttcttatctgaagaacgtgcagtgtttttacatgaaaatagaagagtggcagggccaagttgtatttctacatgagctagtagcggggatttcgggcaaatcttacgggatatacgttgcggaacttgccgggtttcccaaaaatgttctggagagagccagattttttatgggggagctcggtgaaagtggtagtctgagttcaaattgtgagggtctagttgggcagcacagcacctga

SEQ ID NO: 4047 - protein, 819 aa, Anaplasma marginale str. St. Maries
MVKASDNTEYTPIIRQYKSLKDQYEGCLLFYRLGDFYELFFDDAVVASRALDIVLTKRGAGTPMCGIPTHSADSYLGRLVKLGHKVAICEQLETVEEARKRGHRALVKRDVVRIVTPGTLLEDGLLEASENNYLACLSRVGDSYGVAWMDLSAGIFNVRSSRLENIDSEIQRIRPRELLISDRLKEQREIELILRRHRCAVTSHSESFFDVKKAEKVLCGIYGVNTLRGLGNFTDVEVSACGSLVEYVRTTQKNNLPKLGYPKVCDSKSFVLIDGAALRNLELFCTQSGEKEGALVSVIDRTVTAIGSRLLKRHLAFPSSCPHVINSRQDAVEFFVKSRNICESIRDVMRGIPDMERILTRIKLLKCSPRDVCMLGKALAKILRLQQIMLEVDNPMLVRIVGEFGEHEKLLKLISGTILENNAANARDGGFINPACNARLATVVRIESESDKLMQDLRDKYRKLTGIGSLKIAYNSVLGYYIETPASHKLKDTIFIHRQSLAHTMRHTTAELRELEETITAAKSEIMELEAQIFRGLCLRISEEAQSVELAANAVAELDVLISLARLAVENKYVRPIVDDSREFAVKRGRHPVVETGVRFIANDVNLSEDGRMWLITGPNMAGKSTFLRQNALIAILAHIGSFVPAESAHIGVIDKIFSRVGASDSISLGYSTFMVEMAETAAILNQATDRSLVILDEVGRGTGIHDGFSIALAVIEHIHDVTKSRAICATHYHELPKFSSYLKNVQCFYMKIEEWQGQVVFLHELVAGISGKSYGIYVAELAGFPKNVLERARFFMGELGESGSLSSNCEGLVGQHST

SEQ ID NO: 4048 - DNA, 2769 bp, Ralstonia eutropha JMP134
  CDS (1)..(2769): transl_table=11
atgccggggaagagacggcaacgacccgcaacgtcgtgcgggctacgctgccggctacgccgcaaggccacgccagacaagggaatgcaggagaaaatcgaattgaatcaggaagttgcgaagccccttgcggagaagcacactccgatgatgcagcaatatttgcgcatcaaagcggaccatccggacactttgctcttctaccggatgggcgacttctacgagctgtttcacgacgatgccgaaaaggccgcgcggctgctcgatatcacgctgaccgcgcgcggcagttccaacggcgtgccgatccgcatggcgggcattccgttccattcggcggaccagtacctcgccaagctcgtgaagcttggcgagtcggtcgcgatctgcgaacagatcggcgacccggccgcgagcaagggccctgtcgagcgcaaggtggtgcgcattgtcacgcctggcacgctgaccgacgcctcgctgttgccggacaagtccgatacgttcctgatggcggtccatcagcagaccacgcggcgcggcgtcagcaagaccgggctggcctggctgaacctggctagcggcgaacttcggctgatggaatgcgaagcggcacagctcgcgcgcgaattcgaacgcatccgccccgccgaattgctctacgcggacggcatcgatttgcctgccgtggcatgcgcgcgcacgcggctaccggagtggcacttcgaccaggatgccggcacgcgccgcctgctcgaacagcttggcgtggcgagcctggaacccttcgggtgcgccgggctcggcgccgcgatcggtgcggccggcgcgctgctgaactatgcggcgaccacgcagggccagtcgctgcgccatgtgcgtgacatcaaggtcgagcgcgaatcggaattcgtcgggctggactcggccacgcgtcgaaacctggagctgaccgagacgctgcgtggcggcgaatcgcccacgctgttctctctgctggatacctgcgcgacggcgatgggcagccgcgcgctgcgccactggctgcatcacccgctacgcgatcccgcgctgccgcgcgcacgacagcaggccatcggcgtgctgatcgaccacggcatcgacgacctgcgcagcgcattacgcaagcttgctgacgtcgagcgcattacctcgcgcttggcgctgctgagcgcgcgcccgcgcgatttgtcttcgctgcgcgatacgctgcgcgcgttgccgcatgtgcgcgcgtgcctgcaggccgagccggacagctcgctgctgtcgctgaccgtcgccgaactcgccgtgccgcaagcctgcctggacctgctgatctccgcggtcgccgaggagcccgccacggtcgtgcgcgacggcggcgtgatcgcgcgcggctatgacgcggaactcgacgagctgcgcgatatttccgagaactgcggccagttcctggtcgacctggaatcgcgcgagcgtacccgcaccggcatcgccaacctgcgtgtcgagtacaaccgcgtgcatggcttctacatcgaagtcacgaacggccaggccgacaaggtgcccgacgattaccgccggcgccagacgctcaagaacgctgaacgctatatcacgcccgagctgaaagccttcgaggacaaggcgctgtcggcgcaggaccgtgcgctagcgcgcgagaagcagctctacgacgtgctgctgcaggcgctgctgccgcatatcggcgaactgcaacgcgtggccggtgctctggcgcggcttgacgtgctggcctcgctggccgagcgcgcgcagacgctggactggtcgtgcccggagcgcgtgggcgacaacgtgatcgacatcgtgcagggccgccatcccgtggtggaaggccagctcgcagccgaatccgtgccattcatcgccaacgactgccagctcaacgaggcgcgcaagttgctgctgatcaccggcccgaacatgggcggtaagtcgaccttcatgcggcagaccgcgctgatcgtgctgctcgcctgcgtgggcgcctacgtaccggcccggcgcgcagtgatcggccccgtggaccgcatctttacgcgtatcggcgccgccgacgacctggcgggcggacgctctacgttcatggtcgagatgaccgaggcggcggcgatcctgcaccacgccacgcctgccagcctggtgctgatggacgagattgggcgcggcacctcgaccttcgacgggctcgcactggcctgggcgatcgcacgccacctgctgtcgcacaaccgtagccacacgctgttcgcaacccactacttcgaactcacgcaactgccgcaggagttcccgcaggctgcgaacgtgcacctgtcggccgttgaacatggcgacggcattgtcttcctgcacgcggtgcaggacggccccgccagccaaagctacggcttgcaggtcgcgcagctcgccggcgtgccgcagcccgtgattcgcgccgcacgcaagcatctcgcatggctcgaacagcagtcggccgatgccacgccgacgccgcagctcgacctgttcgccccgccgccacatcctgacacgagcgacgacgacgagcctgtcagcattggaaaacctgtgcaagtcgcattgctgcccgaacaggcagctgtgctcgacgcgctctcggatctggacccggacagcctcactccacgtgctgcgctggatgcgctctaccggctcaaggtgctggctggcgaggttgtcgacgccgcatga

SEQ ID NO: 4049 - protein, 922 aa, Ralstonia eutropha JMP134
MPGKRRQRPATSCGLRCRLRRKATPDKGMQEKIELNQEVAKPLAEKHTPMMQQYLRIKADHPDTLLFYRMGDFYELFHDDAEKAARLLDITLTARGSSNGVPIRMAGIPFHSADQYLAKLVKLGESVAICEQIGDPAASKGPVERKVVRIVTPGTLTDASLLPDKSDTFLMAVHQQTTRRGVSKTGLAWLNLASGELRLMECEAAQLAREFERIRPAELLYADGIDLPAVACARTRLPEWHFDQDAGTRRLLEQLGVASLEPFGCAGLGAAIGAAGALLNYAATTQGQSLRHVRDIKVERESEFVGLDSATRRNLELTETLRGGESPTLFSLLDTCATAMGSRALRHWLHHPLRDPALPRARQQAIGVLIDHGIDDLRSALRKLADVERITSRLALLSARPRDLSSLRDTLRALPHVRACLQAEPDSSLLSLTVAELAVPQACLDLLISAVAEEPATVVRDGGVIARGYDAELDELRDISENCGQFLVDLESRERTRTGIANLRVEYNRVHGFYIEVTNGQADKVPDDYRRRQTLKNAERYITPELKAFEDKALSAQDRALAREKQLYDVLLQALLPHIGELQRVAGALARLDVLASLAERAQTLDWSCPERVGDNVIDIVQGRHPVVEGQLAAESVPFIANDCQLNEARKLLLITGPNMGGKSTFMRQTALIVLLACVGAYVPARRAVIGPVDRIFTRIGAADDLAGGRSTFMVEMTEAAAILHHATPASLVLMDEIGRGTSTFDGLALAWAIARHLLSHNRSHTLFATHYFELTQLPQEFPQAANVHLSAVEHGDGIVFLHAVQDGPASQSYGLQVAQLAGVPQPVIRAARKHLAWLEQQSADATPTPQLDLFAPPPHPDTSDDDEPVSIGKPVQVALLPEQAAVLDALSDLDPDSLTPRAALDALYRLKVLAGEVVDAA

SEQ ID NO: 4050 - DNA, 2661 bp, Rickettsia sibirica 246
  CDS (1)..(2661): transl_table=11
atgaatcttcaagagttgaaacaaaaatataattacgatgttgcaacgaaaatgatgcagcaatatctagacattaaatttgctcatttagattgtttactactatttagaatgggtgatttttatgaaatgttctatgaagatgcaattctagcaagcaatgtacttggcattgctttaacaaagcggggcaaaaacggcgaagaagaaattgcgatgtgcggggtaccttatcatgcccttgagaattatttaactaagttaattgaagcaaattataaggttgctatttgtgatcaactagaaacacctgaagaagcaaagaatagaggcggttataaagcggtcgttactagggatgttacacgtattataactccgggaactataattgaagaaaatttaattgcttcagccgaacctaattatttagcaagtctcgtaataccgaaaaataaagaaacagctagcctttgttatgttgatctttctacttccgaaattgttgtagttaatgtaccggaaacggaaattcttaatgagctggctcgtttaaaacctcgtgaaattctgcttagcgaaaatctgagatcttctaatcttgcggatagtattttcaaacaattaaattttcgtattacctatcaagttgatagtttttttgcgattaataaatgcgaaaaaatcattttagatttttataaaatgaaagatattaaaggaatcggcgagatatctagtagtcaaatttgtgccataggtagcgttttagaatatttatcgttaacgcaaaaacaaaatattcctcatttgccaatccctagaattatcaaatttcatagctatatgactattgatttctctactagacgcaaccttgaaattgtcacacactcacaaggcggctcgcaaggaagtttattaagcacccttaatcatacggttactaaacaaggtggacgtttactatataattttctttcaagtcctttaaccaacattgctaaaataaatcatcgtttaaatattaccgagttcttttattccaacttagaaatagtaaaaaaaattagagaacttctaaaaaaaactagtgatatagaacgctgcttaacacgtattacgatgaacagaagttcaggtcgtgatttacttagcattaaatatactttagaaacggcaacgattattaaaggagtattctttgacgcttacggttttaatttacctgattttatcgaaaaaattattaaacctctatcaggtgatgcagaattatataatttaatagacaaaacaatacgagaagatgcaccgaataatttaaatgacggaggtataataaaacataaatatcatccgaaagtagcccaattacatgatttaattaataacggaaaattatatattgaaaagctaaaagatcaatatcgcaaagaaacaggaatagacagtttaaaaatatctcataataatgttatagggctttttatcgatatcaccgctaaaaatgttaataaaatccttgatcccaaatttattcaccgtcaaacaacggttaatcatgttcgttatactactgctgaactacaaaagcttgaaagtgagttagtcaatgctaaaaccttagtaataagcttagaaaaagaattatatgcggatatttgtagccaagtaatcgaaaaagcttcctatttacgaatgcttgcaagctccttaagcgggcttgacgtattttgtaattttgcttacatcgctgatgaatatgattatgttaagcctgagtttaccgatgatttaagctttgatatcgttaaaggacggcatcctgtagtagagagagcactacagcaagaaagcaaaagctttgtatataatgattgtcatttatcagagcttgagcgtatttggttaattaccggtcctaatatggcaggtaaaagtacttttttacgtcaaaacgccattattgcaatcattgctcaaataggttcgtttgtgccggcaaaaagtgctaaaataggggtagtcgacaaaatatttagccgaataggtgctgccgatgacttaattaagggacaatcgacctttatggcagagatgcttgaaacctcggcaattcttgctcaatctacaaaaaactcactaatcatacttgatgaggtaggtagaggcacatccacttatgacggggtatctatagcatggtcagtgcttgaatatattcatgataagctgaaatgtcgctgtttatttgcaacgcactatcatgagctgaccgttatgagtaatttcctgccggctttgcaaaattatactattgctattgaggagtcaggtaaagatattctatttttacataatattatatcaggtgctgccgataggtcctacggtcttcatgttgcggctcttgccggtcttcctgcgagtgttataaacagagctgagcagattctgcttaaatttgaaaaaacttctacaggtaaaggaaaaaatattttatcaacggaatcaaataatttgagtttgttttatcttgaacctaataaaactactataaacagcaaattagataacaaattcagcactatcgatcctgataaactatcccctaaagaagcacttgagttaatttatgagttaaaaaagttggtttga

SEQ ID NO: 4051 - protein, 886 aa, Rickettsia sibirica 246
MNLQELKQKYNYDVATKMMQQYLDIKFAHLDCLLLFRMGDFYEMFYEDAILASNVLGIALTKRGKNGEEEIAMCGVPYHALENYLTKLIEANYKVAICDQLETPEEAKNRGGYKAVVTRDVTRIITPGTIIEENLIASAEPNYLASLVIPKNKETASLCYVDLSTSEIVVVNVPETEILNELARLKPREILLSENLRSSNLADSIFKQLNFRITYQVDSFFAINKCEKIILDFYKMKDIKGIGEISSSQICAIGSVLEYLSLTQKQNIPHLPIPRIIKFHSYMTIDFSTRRNLEIVTHSQGGSQGSLLSTLNHTVTKQGGRLLYNFLSSPLTNIAKINHRLNITEFFYSNLEIVKKIRELLKKTSDIERCLTRITMNRSSGRDLLSIKYTLETATIIKGVFFDAYGFNLPDFIEKIIKPLSGDAELYNLIDKTIREDAPNNLNDGGIIKHKYHPKVAQLHDLINNGKLYIEKLKDQYRKETGIDSLKISHNNVIGLFIDITAKNVNKILDPKFIHRQTTVNHVRYTTAELQKLESELVNAKTLVISLEKELYADICSQVIEKASYLRMLASSLSGLDVFCNFAYIADEYDYVKPEFTDDLSFDIVKGRHPVVERALQQESKSFVYNDCHLSELERIWLITGPNMAGKSTFLRQNAIIAIIAQIGSFVPAKSAKIGVVDKIFSRIGAADDLIKGQSTFMAEMLETSAILAQSTKNSLIILDEVGRGTSTYDGVSIAWSVLEYIHDKLKCRCLFATHYHELTVMSNFLPALQNYTIAIEESGKDILFLHNIISGAADRSYGLHVAALAGLPASVINRAEQILLKFEKTSTGKGKNILSTESNNLSLFYLEPNKTTINSKLDNKFSTIDPDKLSPKEALELIYELKKLV

SEQ ID NO: 4052 - DNA, 2691 bp, Fusobacterium nucleatum subsp. vincentii ATCC 49256
  CDS (1)..(2691): transl_table=11
atgttaaaatgtataagttatagtgaaaaaagaaaaattaaattgagaggtataaaaatgtcagcagacacacccttaatgcaacaatataaaaaaattaaaaaagattatcaaaatgaaatactaatgtttagattgggagatttctatgaaatgttttttgaagatgctaaaatagcttcaaaagaattaggacttactcttacaaaaagaaataaagaaaaaggacaagatgttcccttagcaggagttccatatcattcagtggcatcatatatagcaaaattagttgaaaaaggttatagtattgctatctgtgatcaagtggaagatcctaaatctgcaacagggattgtaaaaagagaggtaacaagagttataactcctggaactataatagatgtagatttcttagataaaaataataataactatattgcttgtataaaaataaatacaatagaaagtgtagctgcaatagcttatgctgatataacaacaggagaattttcagtttttgaaataaaaggaaaaaatttctttgaaaaagcattagccgaaatgaacaagatacaagcaagtgaaattttgttagatgaaaaaacatattcagaatatatagaaatttttaaagaaaaaatgtcattttcaggagtcaaatttacagaagtttctaatgtaaaaaaagctgaaaattttataacttcatattttaatattatatctattgaagtattttctttaaaatcaaaagatttagctatctcaacatcagcaaatcttttacactatattgatgaattacaaaaaggaaatgaattgccttttagcaagatagaatatagaaatattgacaatataatggaattaaatataagtacacaaaataatctaaatctagtacctaaaagaaatgaagaagctagaggaactctattaggagttttagataattgtgtaacttctgttggtagtagagaattaaaaaaaattataaaaaatccatttttagatatagaaaagataaaacaaagacaattctatgtagactatttctataatgatgtacttttaagagaaaatgtaagagaacatttaaaagatatttatgatgttgaaagaatagcaggaaaaataatctatggtacagaaaatggaaaggatctgctatcattaaaggattctataagaaaatcattggaaacttatagacttttaaaagagcatcaagagataaaaaatcttttagatatagatgttaaaattctattagagatatataataaaatagaattaattatcagtgttgaagcacctttttcagttagggaaggtggaattataaaagatggatataacactgaattagatgaacttaggaaaatatctaagctaggaaaagattttatacttgaaatagaacaaagagaaagagaaagaacaggtataaaaggactaaaaataaaatacaataaggtctttgggtattttatagaagttactaaggcaaatgaacatttagttccaaaggactatataagaaaacaaactcttgtaaacagtgaaagatatatagttcctgatttaaaagaatacgaagaaaaagttattacagctaaaagtaaaattgaagccttagagtatgaattatttaagcaacttacttctgaaattaaagaacatatagatagtttatataaattagcaaatagaatagcaaatttagatatagtttcaaatttttcgcatatagcaacaaaaaattcttatgttaaaccagaaataagtgaagaagatattttagaaattaaaggaggtagacacccaatagttgaaactttaattgctagtggaacttatgttaaaaatgatattgttttagatgataaaaataatttaatcattttaacgggtccaaatatgtctggaaaatctacttatatgaagcaagtggctttaaatataataatggcacatataggtagctatgtagcagcagattatgctaaaattcctattgtggataaaatttttacaagagttggagcaagtgatgatttacttacaggacaatctacctttatgttagaaatgacggaagtagctagtattttaaatagtgcaacaaataaatcttttatagtcttagacgaaattggtaggggaacttcaacttatgatggaatctcaatagcaactgctatcacagagtatattcataatgttataggagctaagactatatttgcaactcactatcatgaacttactgaacttgaaaaagagcttgaaagagcaataaattttagagtagaagtaaaagaagatggtaaaaatgttgtatttttaagagaaatagtaaaaggtggagcagataaatcttatggtattgaggttgcaagattatctggtgttcctaaggaagttttaaatcgttcaagaaagattttaaaaaaattagaaactagaaaaaatttaatagaaaataaaataaaagctgaacaaatgatgctttttggaagtggatttgaagaagattttgaggaagaagaaacagaaatattatctgaaaatgaaaataaagtattggaattattaaaaaatatggacttgaattctctaagtcctttggaaagtttactaaaattaaatgaattgaaaaagattcttatcggaggaactgatgagtaa

SEQ ID NO: 4053 - protein, 896 aa, Fusobacterium nucleatum subsp. vincentii ATCC 49256
MLKCISYSEKRKIKLRGIKMSADTPLMQQYKKIKKDYQNEILMFRLGDFYEMFFEDAKIASKELGLTLTKRNKEKGQDVPLAGVPYHSVASYIAKLVEKGYSIAICDQVEDPKSATGIVKREVTRVITPGTIIDVDFLDKNNNNYIACIKINTIESVAAIAYADITTGEFSVFEIKGKNFFEKALAEMNKIQASEILLDEKTYSEYIEIFKEKMSFSGVKFTEVSNVKKAENFITSYFNIISIEVFSLKSKDLAISTSANLLHYIDELQKGNELPFSKIEYRNIDNIMELNISTQNNLNLVPKRNEEARGTLLGVLDNCVTSVGSRELKKIIKNPFLDIEKIKQRQFYVDYFYNDVLLRENVREHLKDIYDVERIAGKIIYGTENGKDLLSLKDSIRKSLETYRLLKEHQEIKNLLDIDVKILLEIYNKIELIISVEAPFSVREGGIIKDGYNTELDELRKISKLGKDFILEIEQRERERTGIKGLKIKYNKVFGYFIEVTKANEHLVPKDYIRKQTLVNSERYIVPDLKEYEEKVITAKSKIEALEYELFKQLTSEIKEHIDSLYKLANRIANLDIVSNFSHIATKNSYVKPEISEEDILEIKGGRHPIVETLIASGTYVKNDIVLDDKNNLIILTGPNMSGKSTYMKQVALNIIMAHIGSYVAADYAKIPIVDKIFTRVGASDDLLTGQSTFMLEMTEVASILNSATNKSFIVLDEIGRGTSTYDGISIATAITEYIHNVIGAKTIFATHYHELTELEKELERAINFRVEVKEDGKNVVFLREIVKGGADKSYGIEVARLSGVPKEVLNRSRKILKKLETRKNLIENKIKAEQMMLFGSGFEEDFEEEETEILSENENKVLELLKNMDLNSLSPLESLLKLNELKKILIGGTDE

SEQ ID NO: 4054 - DNA, 2610 bp, Croceibacter atlanticus HTCC2559
  CDS (1)..(2610): transl_table=11
atggccaaagcaaagaaagtcacaccattaatgcagcaatataatagcatcaagacaaagtatcctgatgccttattgttatttcgcgtaggcgatttttacgaaacttttggggaagatgctgtaaaagcagcacgcatattaaatatagtgctcactaaccgaaataacggtggcgagcgtacagagcttgcaggatttccacaccattcattaaatacctacctacccaaattagtaaaagcaggagaacgtgtggctatttgtgaccaactagaagatccaaaagctactaaaagtattgttaaacgtggcgttacagaacttgttacgccaggtgttgcactaaatgatgaggtgctacagagcaattctaataacttccttgcttcagtttacattggaaaaaagcaaatgggtgtagcgtttttagatgtttcaacaggcgaatttcttacagcgcaaggctcttcagaatatatagataaattactgcaaaattttgcgcctagtgaaatacttattgcaaaacaaaagaaagcagattttacagcaatctttgggtcagattttcatacattttatattgaagattgggtgtttaagacagactatgcccacgaaacactacatcaacattttggtgtaaaatcattaaaaggctttggtgtagatcatttagaggatggtatcatagcctctggagctatattatattacctaagtgaaacacaacatcataaattaaaacatattacaagcataagccgcattgcagaagacgcctatgtttggatggatcgttttactataagaaatctagagctttatcaaggcacatctttacagtctgtaactttattagatgttatagataaaacaacatctcctatgggaggtagaacattaaagcgttggttggcactgccattaaaaaacgctgaaaaaataaaaaaacgtcaccgagttgtaaactatttccttaagcaaaaaacattattgagtgatgtcacgtctcatataaaacagattggagatatagagcgtctcatttctaaagtagctaccgctaaagtaagcccaagagaagttattcaacttaaaaactcattagatgctattgtgcctattaagacattagcccttaaatctgaaaacgatgctctaaaagttataggtgataatttacagtcttgtgatttattgcgaggaaaaataacagaaaccttaaatgaagaagcaccagttaatatactaaagggtagtactatagctagaggattttccaaagagctggatgagcttagagatatacgtttttctggaaaagaatatctagataaaatgcttcagagagaaacagaggctactggtattacatcattaaaaatagcaagcaacaatgtttttggatattatattgaagtgagaaattctcataaagataaggttccagaaaactgggttagaaaacaaactttggtaaatgcagagcggtatattactgaagaattaaaagaatacgaagctaaaattttaggagcagaagagaagattgtgcaaatagagcaagagttgttctctaaattagttacttggatttcagactacataaaaccagtacagcaaaatgcacatcttataggagaaatagactgtctttgtggttttgctacacaagctatgcaggaaaactattgtttgccagaaatcacagaagactatagtttagagattacagaaggaaggcatcccgttattgaaaaacagttgccacttggagaaccctatataactaacgatatcttgcttaatcgtgatgatcagcaaatgattatgataactgggccaaatatgagtggtaagtcagctatcctaagacaaacggcactaattgtattattagctcaaatgggaagttttgtgcctgctaaagctgccaaaataggattagtagataagatttttactagagtaggcgcaagtgataatatttcgatgggtgaaagtacatttatggtcgagatgaatgaaactgcgagtattcttaataatctttcagatcgtagtttagtgcttttagatgagataggtcgtggtacaagtacatatgatggtatatctatagcttgggcaattagtgaatacttacatgaacacccagcaaaggctaagacactatttgcaactcattatcatgagttaaatgagatgacagaaacctttgagcgcattaagaattataatgtgtctgtaaaagaattaaaagataatgtactctttttaagaaaactagttccaggaggtagcgaacatagcttcggaattcacgtagctaaaatggcaggaatgccacaacaggtattgcatcgagcaaataaaatattaaagaaattagagaaaagtcattcttctgaagagttaagcggacagataaaaaaagcaacagagcaagaaccacaattaagcttctttaagttagacgatcctttattagaagatataaagcaggaaatcatacaagtagacataaatactttaacgccagttgaagcattaatgaagttaaatgagattaaaagaatgcttgtcccaaaaggaaatgattaa

SEQ ID NO: 4055 - protein, 869 aa, Croceibacter atlanticus HTCC2559
MAKAKKVTPLMQQYNSIKTKYPDALLLFRVGDFYETFGEDAVKAARILNIVLTNRNNGGERTELAGFPHHSLNTYLPKLVKAGERVAICDQLEDPKATKSIVKRGVTELVTPGVALNDEVLQSNSNNFLASVYIGKKQMGVAFLDVSTGEFLTAQGSSEYIDKLLQNFAPSEILIAKQKKADFTAIFGSDFHTFYIEDWVFKTDYAHETLHQHFGVKSLKGFGVDHLEDGIIASGAILYYLSETQHHKLKHITSISRIAEDAYVWMDRFTIRNLELYQGTSLQSVTLLDVIDKTTSPMGGRTLKRWLALPLKNAEKIKKRHRVVNYFLKQKTLLSDVTSHIKQIGDIERLISKVATAKVSPREVIQLKNSLDAIVPIKTLALKSENDALKVIGDNLQSCDLLRGKITETLNEEAPVNILKGSTIARGFSKELDELRDIRFSGKEYLDKMLQRETEATGITSLKIASNNVFGYYIEVRNSHKDKVPENWVRKQTLVNAERYITEELKEYEAKILGAEEKIVQIEQELFSKLVTWISDYIKPVQQNAHLIGEIDCLCGFATQAMQENYCLPEITEDYSLEITEGRHPVIEKQLPLGEPYITNDILLNRDDQQMIMITGPNMSGKSAILRQTALIVLLAQMGSFVPAKAAKIGLVDKIFTRVGASDNISMGESTFMVEMNETASILNNLSDRSLVLLDEIGRGTSTYDGISIAWAISEYLHEHPAKAKTLFATHYHELNEMTETFERIKNYNVSVKELKDNVLFLRKLVPGGSEHSFGIHVAKMAGMPQQVLHRANKILKKLEKSHSSEELSGQIKKATEQEPQLSFFKLDDPLLEDIKQEIIQVDINTLTPVEALMKLNEIKRMLVPKGND

SEQ ID NO: 4056 - DNA, 2622 bp, Sulfitobacter sp. EE-36
  CDS (1)..(2622): transl_table=11
atgatggcgcaatatctagagcttaaatcccagtacgccgaagcgctgctgttctaccgcatgggcgatttctacgagatgttctttgacgatgccgtcgccgcggctgaagcgctggatatcgcgctgaccaaacgcggcaaacacgggggcgaagacatccccatgtgcggcgttccggtgcatgccgccgaagggtatttgctgacgctgatccgcaaaggctttcgcgtggcggtatgcgaacagatggaaagcccggcagaggcgaagaaacgcggctataaatccgtggtcaaacgcgatgtcgtgcggctggtcacgcccggcacattgaccgaggaatccctgctcgaagcgcggcgccacaactatctggccgcatttgcagaggtccgcgatggtcatgcgctggcctgggtcgatatttcgaccggtgcgtttcacgtgatgcccctgaccctgtcgcgccttggccccgaactggcccgtctgtccccgtcagagctgatcgtgtcagaagcgaaagaggctgatttacgcgaattagtctctgatttcgacatcgcgctgacccctattgcgcgctctgcctttgacagcagcagcgctgagaaacgggtctgcgatctgttcggcatcgggtcgctcgacgccttcggcagctttgaacgcgccgatatctcggccatgggcgcgatcatcgactatctcgagattacacagaagggcaaactccccctcctccgcccgccgcagaaagaggccgaggcccgcagcgtgcagatcgacgctgccacacgtcgcaatcttgaactgacacatgcgctgaccggtggtcgcgccggtacgctgttgtccgttatggacaagacagtgaccgccggtggcgcccggctgctggaacggcgcatttcgtcaccttcccgtgtgttagagacgattcaatcccgtctggacgcgatcagctttgcctatgacacaccgtcgatccgcaatgacatccgccagcatctgcgcaacgtccctgatctggaccgcgccctgtcgcgcctgtcgctggaccgtggcggcccccgtgaccttgccgccatccgcaacggcctgaccgaagccagccatctggccgacaagatgcaaaccgccgccctgcccgatctgctggcccaggctgccaaagggcttaccggccatgacagcctgattgatctgctcgacgatgcgctgatcgccgaaccacccctgctggcccgcgacggcggctttatcgcgccggggtatgacgccgagctggacgaggtgcgcaccctgcgggacgaaggccgcagcgtcattgcccagatgcagcaggatttcatcacgctcaccggtatctcgacgttgaagatcaaacacaacaacgtgcttggctatttcgccgaagtcacatcgactcacgccgagaaaatgctgtcggcgccgctgtccgatacctttatccaccgtcagaccaccgccaatcaggtccgtttcacaaccgtggaactgtccgagatggagacaaagatcctcaacgcgggcaaccacgcgctggagattgaaaagcggctctatgaaacgttgaaacgcgcgattctggatcactccggcccgatcggtgtcgcctctgctggattggccgagattgatctggccaccggtctggccgatctggcgcagtccgaaaactgggtgaaaccccgcgtcgataattcacgtgccttcgacattcaggggggccgccatccggtcgtggaacgcgccttggcccagcaatccggcagcccctttatcgccaacgattgcaccctgtcggccgatggcgacaacgcgaatatctggctgctgaccggccctaacatggcgggtaaatcgaccttcctgcggcagaacgcgatcatcgcgttgatggcgcaaatgggcagctacgtgcctgccgccaccgcccacatcggcctgattagccagattttcagccgtgtcggcgcctctgacgatctggcacgaggccgttccacgtttatggtcgaaatggtcgaaaccgccgcaatcctcaatcaggcagacgaccgcgcacttgtgatcctggatgaaatcgggcgcggcacggcgacctatgacggcttgtccatcgcctgggccacgctggaacatctgcacgatatcaaccgctctcgcgctttgttcgccacacactaccatgaaatgaccgcgctttcgaacaagctgggcggggtcgataacgccaccgtcgcggtcaaggaatgggacggagaggtgatcttcctgcacgaggtccgcaaaggtgccgccgatcggtcctacggtgtgcaggtcgcgcaattggccggcttgccgccttccgtcatcgcgcgcgcacgcgtcgtgcttgaagcgttggaaaagggcgaacgcgaaggcggcgcgacgcagaaaaccctgatcgacgatctgcccctgtttgccgtggcaccggcacctgcgccccaaccaaaacaaagctccaagcttgaagaaacgctggccgagattatccccgacgagctctctccacgtgaagcgctcgacctgctctataaattgaaagaggcggccaaaacctga

SEQ ID NO: 4057 - protein, 873 aa, Sulfitobacter sp. EE-36
MMAQYLELKSQYAEALLFYRMGDFYEMFFDDAVAAAEALDIALTKRGKHGGEDIPMCGVPVHAAEGYLLTLIRKGFRVAVCEQMESPAEAKKRGYKSVVKRDVVRLVTPGTLTEESLLEARRHNYLAAFAEVRDGHALAWVDISTGAFHVMPLTLSRLGPELARLSPSELIVSEAKEADLRELVSDFDIALTPIARSAFDSSSAEKRVCDLFGIGSLDAFGSFERADISAMGAIIDYLEITQKGKLPLLRPPQKEAEARSVQIDAATRRNLELTHALTGGRAGTLLSVMDKTVTAGGARLLERRISSPSRVLETIQSRLDAISFAYDTPSIRNDIRQHLRNVPDLDRALSRLSLDRGGPRDLAAIRNGLTEASHLADKMQTAALPDLLAQAAKGLTGHDSLIDLLDDALIAEPPLLARDGGFIAPGYDAELDEVRTLRDEGRSVIAQMQQDFITLTGISTLKIKHNNVLGYFAEVTSTHAEKMLSAPLSDTFIHRQTTANQVRFTTVELSEMETKILNAGNHALEIEKRLYETLKRAILDHSGPIGVASAGLAEIDLATGLADLAQSENWVKPRVDNSRAFDIQGGRHPVVERALAQQSGSPFIANDCTLSADGDNANIWLLTGPNMAGKSTFLRQNAIIALMAQMGSYVPAATAHIGLISQIFSRVGASDDLARGRSTFMVEMVETAAILNQADDRALVILDEIGRGTATYDGLSIAWATLEHLHDINRSRALFATHYHEMTALSNKLGGVDNATVAVKEWDGEVIFLHEVRKGAADRSYGVQVAQLAGLPPSVIARARVVLEALEKGEREGGATQKTLIDDLPLFAVAPAPAPQPKQSSKLEETLAEIIPDELSPREALDLLYKLKEAAKT

SEQ ID NO: 4058 - DNA, 2625 bp, Roseovarius nubinhibens ISM
  CDS (1)..(2625): transl_table=11
atgatggcgcaatttctggaactcaaggcaggctatcccgaggcgctgctgttctatcgcatgggcgatttctacgaattgttcttcgatgatgccgtcgccgcctcggccgcgctcgacatctcgctgaccaaacgcggcaagcatctgggcgaagacatcccgatgtgcggcgtgcccgtccatgccgccgaaggctatctgctaacgctcatccgcaaagggtttcgcgtcgccgtctgcgaacagatggaggatcccgccgaggccaagaaacgcggctcgaaatccgtggtcaaacgcgatgtcgtgcggctcgtcacccccggcaccctgaccgaggacagtctgctcgaggcgcgccgtcacaattttctggccgctttcgccaatgttagagacacatctgccctcgcttgggtcgatatttccaccggcgcgtttcacgtcatgccgctcgcgcccgcgcggcttggcccggaactggcgcggctcgccccggccgaggtcatcgtcgccgacgggctgacccgcgacatggccgagatcatcgaagagagcggcgcatcgctctcgccgctgggcgccgcgtcctttgacagcaccggcggcgaaaaacgcctctgcaccctgttcggcaccgcctcgctcgacgcctatgggcagttcacccgccccgaacttgccgccatgggggcgctggtcgattatctcgacatcacgcaaaagggcaaactgcccctgctccaagccccgaaacagctgagccagggcggcgcgatgcagatcgacgccgccacccggcgcaatctcgaactgacccatgcgctctcgggcgggcgcgctggctcgctcttgtcggtgatcgaccgcaccgtcaccgccggcggcggccgcctgctggaacagcggctttcaagcccctcgcgcgatctgcaaaccgtgacatcgcggctcgactccgtgtcatttgcgctggaacagtctcgattctcggatcagctccgcgatatgctgcgccgcattcccgatatggatcgggcgctgtcacggctcgggctcgaccgcggcggcccgcgtgatctcaccgccattcgcaacgggctcgaccatgcggcccagattgccgccctgccccgtcccgacgatatgccgcgcgacatttccgcggccctcgcccggctcaccggccatgacgaactgctcgacctgctcgatcaatcgctggtggccgaaccgccgcttctcgcccgcgacggcggtttcatcgcccccggctttgacgaagagctcgacgagtgccgcaagctccgcgacgaaggccgcagcgtcatcgccgccatgcaatcggaatatgccgagctgaccgggattgcctcgctcaaggtcaaacacaacaacgtgctgggctatttcgtcgaagtcaccgccacccatgccgacaagatgctgtcggagccgctcaatcagaccttcaagcaccgccagaccaccgccaatcaggtgcgcttcaccaccgtgcccctgtccgagatggaaacccgcatcctgaacgcgggcggccgcgcgatcgagatcgaaaagcggctctatgacaccctgaaacgcgccattctcgaccgctacgcgcaggtctccgacagcgccgccgcgctggcagagctcgatttgcacagcgcgctcgccacgctggcccgcgaattggactggtgccgccccaaggtcgatgacagccgcgcgctccacatcaccgcaggccgtcacccggtcgtggaacaggcgctgcgcgcaggctccggcgcgccgtttatcgccaatgattgcgatcttggcggcgaggccgacatctggctgctcaccggccccaacatggcgggtaaatcgacctttctgcggcagaacgcgctcatcgccattctcgcccagatgggcagtttcgtccccgccgcctcggcccatatcggccttgtcagtcaggtcttcagccgcgtcggtgcctccgacgatctcgcccggggccgctcgaccttcatggtcgaaatggtcgaaaccgccgccattctcaatcaggccgatgatcacgcgctggtcattctcgacgaaatcggccgtggcaccgccacctatgacgggctctccatcgcctgggcgacgctcgaacatctccatgaggtgaacggcgcgcgcgcgctctttgccacccattaccacgagatgacgcgcctctcggaccggctcgcccgggtcgacaacgccaccatcgcggtcaaggaacatgatggcgacgtgatctttctgcacgaggtccggcgcggcgcggcggatcgctcttacggcgtgcaggtggccaagctcgcgggtctccccgccacggtggtcgaacgcgcccgcgtcgtgctcgaagcgctggagaaaggcgaacgcgaaggcggcaccacccgcgacacgctgatcgacgatctgccgctcttctccgccgccccgccaccgcccgccgccgcgcccaaatcctcgggcccctcggctttggaatcccggctgtcggaggtgctgcccgacgcgatgaccccgcgcgaggcgctcgatctgatctacgagctcaaatccctgctcgatccgagctag

SEQ ID NO: 4059 - protein, 874 aa, Roseovarius nubinhibens ISM
MMAQFLELKAGYPEALLFYRMGDFYELFFDDAVAASAALDISLTKRGKHLGEDIPMCGVPVHAAEGYLLTLIRKGFRVAVCEQMEDPAEAKKRGSKSVVKRDVVRLVTPGTLTEDSLLEARRHNFLAAFANVRDTSALAWVDISTGAFHVMPLAPARLGPELARLAPAEVIVADGLTRDMAEIIEESGASLSPLGAASFDSTGGEKRLCTLFGTASLDAYGQFTRPELAAMGALVDYLDITQKGKLPLLQAPKQLSQGGAMQIDAATRRNLELTHALSGGRAGSLLSVIDRTVTAGGGRLLEQRLSSPSRDLQTVTSRLDSVSFALEQSRFSDQLRDMLRRIPDMDRALSRLGLDRGGPRDLTAIRNGLDHAAQIAALPRPDDMPRDISAALARLTGHDELLDLLDQSLVAEPPLLARDGGFIAPGFDEELDECRKLRDEGRSVIAAMQSEYAELTGIASLKVKHNNVLGYFVEVTATHADKMLSEPLNQTFKHRQTTANQVRFTTVPLSEMETRILNAGGRAIEIEKRLYDTLKRAILDRYAQVSDSAAALAELDLHSALATLARELDWCRPKVDDSRALHITAGRHPVVEQALRAGSGAPFIANDCDLGGEADIWLLTGPNMAGKSTFLRQNALIAILAQMGSFVPAASAHIGLVSQVFSRVGASDDLARGRSTFMVEMVETAAILNQADDHALVILDEIGRGTATYDGLSIAWATLEHLHEVNGARALFATHYHEMTRLSDRLARVDNATIAVKEHDGDVIFLHEVRRGAADRSYGVQVAKLAGLPATVVERARVVLEALEKGEREGGTTRDTLIDDLPLFSAAPPPPAAAPKSSGPSALESRLSEVLPDAMTPREALDLIYELKSLLDPS

SEQ ID NO: 4060 - DNA, 2634 bp, Oceanicola batsensis HTCC2597
  CDS (1)..(2634): transl_table=11
atgatggcgcagtatctcgagatcaagtcgggctatccggacgccctgctgttctaccggatgggcgatttctacgagttgttcttcgatgacgccgtcgccgcctcggaggcgcttgacatcgcgctgacgaagcgcggcaagcatctgggcgaggatatcccgatgtgcggcgtgcccgtgcacgcggccgagaactatctgctcaccctcatccgcaaggggttccgcgtcgccgtgggcgaacagatggaaagcccggaagaggccaagaagcgcgggtcgaaatccgtggtccggcgcgatgtcgtccggctcgtcacgcccggcaccctgaccgaggaatccctgctcgacgcccgtcgccacaactttctcgccgccttcgcgatcgtgcgcgatcagggcgcgctcgcctgggtcgacatctcgaccggggcgtttcacgtcatgcccctgccccccgtgcggcttgggccggaactggcccggctcggtccgtccgagctgctgatgcccgacgagatcgagcgcgattacgccgaaacagtctctgatttcggcactgcgctcaccccgatgtcgcgcggcagctttgactccaccggtgccgcggaccggctgtgccgcctgttcagggtctcgtccctcgacgcgttcggaaccttttcccgggccgagatctcggccatgggtgcgatcgtcgactatctcgacatcacgcagaagggcaaactccccctcctgcgcaaaccccaacgcgaagccgccgatcgcaccatgcagatcgacgccgccacccgtcgaaacctcgagctgacgcattcgctggccggagggcgcgccgggtcgcttctccatgcgatcgaccgcaccgtcaccccgggcggtgcgcgcctgctggaacggcgcctctccagcccctcgcgcgatctcgccacgatccgcgaccgactggccgctgtggacttcatggtggatcagcgtcagaccgcccgcgacctgcgcgacgcgctacgccgcgtccccgatatcgaccgcgccctgtcgcgcctcgcgatcgaccgggccgggccgcgcgaccttgccgccatccggaacggtctgggccaggccgagcggatcgccggcctcctcgcgcagaccgagttgcctgccctgctggcggacgcctcgacgcatctgcagggccacgacgacctcctcgccctgctcgacaccgccctggtggcggaaccgcccctgctcacccgcgacggcggtttcatcgcccccggccacgaccccgacctggacgaggcgcgcaagctgcgcgacgagggccgcggtgtcatcgcgcagatgcagacgcaatatgccgagcagaccggcatctcctcgatcaagatcaagcacaacaacgtccttggctatttcatcgaggtcacggccacccatgccgacaagatgctgtcagaaccgctgaacgaggtcttcaagcatcgtcagaccaccgccaaccagcttcgcttcaccacgccggaactctccgagatggagacacgcatcatcaatgccggcggccgggcgctggacatcgaaaagcggctctatgacgggctgaaagcgcagatcctcgaccgcgcgtcggaactgacggacaccgcccgcgcgctttcggagctcgatctcgccacggctctcgccgacctctcgatcgccgagaactgggcgcgccccagggtcgacgacagccgcacgctgcgcatcgccggcggccgtcaccccgtggttgaacagtctctgcgcaaggagggcgcgcccttcatcgccaacgatgccgacctgtccggcgacccgtcgatgatctggctgctgacaggtcccaacatggccggcaaatcgaccttcctgcgccagaccgcgctgatcgtcctgctcgcccagatgggcagccatgtccccgcgtccgaggccgagatcggcgtggtcagccagctcttctcccgcgtcggcgcgtccgacgatctcgcccggggccgctcgaccttcatggtcgagatggtcgagacagccgcgatcctcaatcaggcggacgaccgcgcccttgtcatcctcgacgagatcgggcgcggcaccgccacctatgacggtctctccatcgcctgggcgacgctcgaacacctgcacgaggtgaaccgcagccgcgcgctcttcgccacgcattaccacgagatgaccgccctcgccggcaagctgcccggggtcgagaacgcgacggtggcggtccgcgaacacgatggcgacgtgatcttcctgcacgaggtcatccggggcgccgccgaccggagctatggcgttcaggtcgcgcgcctcgccggtctgccggacgccgtggtcgcccgcgcccgcgaggtgctcgacgcgctggaaaaaggcgatcgcgagggcggacagaaacccaaggcgatcatcgacgacctgccgcttttcgcggccgccgcgcccgcgccagagacgggaatcgagacgattccgccggaatacgccgaggtggcgacgatactcgaagcgacgcatcccgatgaactcagcccgcgcgaggcgctcgacctcatctacaggctcaaggcctcgacgcgatcgcggacctga

SEQ ID NO: 4061 - protein, 877 aa, Oceanicola batsensis HTCC2597
MMAQYLEIKSGYPDALLFYRMGDFYELFFDDAVAASEALDIALTKRGKHLGEDIPMCGVPVHAAENYLLTLIRKGFRVAVGEQMESPEEAKKRGSKSVVRRDVVRLVTPGTLTEESLLDARRHNFLAAFAIVRDQGALAWVDISTGAFHVMPLPPVRLGPELARLGPSELLMPDEIERDYAETVSDFGTALTPMSRGSFDSTGAADRLCRLFRVSSLDAFGTFSRAEISAMGAIVDYLDITQKGKLPLLRKPQREAADRTMQIDAATRRNLELTHSLAGGRAGSLLHAIDRTVTPGGARLLERRLSSPSRDLATIRDRLAAVDFMVDQRQTARDLRDALRRVPDIDRALSRLAIDRAGPRDLAAIRNGLGQAERIAGLLAQTELPALLADASTHLQGHDDLLALLDTALVAEPPLLTRDGGFIAPGHDPDLDEARKLRDEGRGVIAQMQTQYAEQTGISSIKIKHNNVLGYFIEVTATHADKMLSEPLNEVFKHRQTTANQLRFTTPELSEMETRIINAGGRALDIEKRLYDGLKAQILDRASELTDTARALSELDLATALADLSIAENWARPRVDDSRTLRIAGGRHPVVEQSLRKEGAPFIANDADLSGDPSMIWLLTGPNMAGKSTFLRQTALIVLLAQMGSHVPASEAEIGVVSQLFSRVGASDDLARGRSTFMVEMVETAAILNQADDRALVILDEIGRGTATYDGLSIAWATLEHLHEVNRSRALFATHYHEMTALAGKLPGVENATVAVREHDGDVIFLHEVIRGAADRSYGVQVARLAGLPDAVVARAREVLDALEKGDREGGQKPKAIIDDLPLFAAAAPAPETGIETIPPEYAEVATILEATHPDELSPREALDLIYRLKASTRSRT

SEQ ID NO: 4062 - DNA, 2580 bp, Pseudoalteromonas tunicata D2
  CDS (1)..(2580): transl_table=11
atgccattagatctgttttctgaacatactataagtcaacaaacacctatgatgcagcaatatttacgaataaaagctgagcatcgcgatatccttttgttttatcgtatgggcgatttttacgagttattttttgatgatgctaagcgtgccgctcaattactcgatatatcacagacccatagaggtcgagccggcggagcgcctattccaatggcgggagtgccatatcatgcggtcgaaaattacctcgctcgcctagtgcaaatgggcgaatcagttgctatttgcgagcaaattggcgacccagcaaccagtaaaggtcctgttgaacgcaaagtcgtcaggatcattactcctggcactatttctgatgaagcattattaaaagagcgccaagataatttactcactgccatttatttagctaaagaagggacgtttggcattgcgtatcttgatatcaattcaggtcgcttttacttaacccaagcaaatactgaagaaagttgccattcaatattacaacgcattcaaccggctgaattattgtatccagaaaactttactgcgatgcatttaatttcaagctataagggaagccgtcgtcgccccgagtgggagtttgacttaaacaccgcctccactattttatgtcaacaattcgaaaccaaagatttaatcggtttcggcgtacaagatgcgcatgaagcactcattgccgcgggttgtttaatgcaatatgtaaaagatacgcaacgtattgctttaccacatataaacgcaattgctttagagcaaaatgaacttcacgttatcttagatgcggcaacacgaaaaaaccttgaactaacgattaatttatctggtgatattgataatacattggctcaggtacttgataaaacagcgaccccgatggggtctcggttgctaaaacgccgtttacatacgccgacccgtgaccataacgagctcaatgcacgattagatgcagtcagtgagatcatgaattgcggtttatttaacgacttttatgacgtattaaaacagattggtgatattgagcgcattgtggctcgattagcactaagaagtgcccgcccacgcgacctttcacgtttacgtaatgcattacagcaacttcatttggtgcaaaatttacttgcacacacctcaagtaatcgattgagcgacatcaagcgtgcttctgcggtgatccctcacattcaatctttacttgagcaggcgattattgaaaaccctccggtgcttattcgagatggtggcgtcattgcccctggctatcatgctgaacttgatgaatggcgagctctaagccaaggtgcaacagatattgttgaggcgcttgaagcaaaagagcgcgaacgcacaggcattgcgactttaaaaattggttataaccgagtgcatggtttttatattgaagtcagccgagcttatgccgatcaagtgccgccagagtacattcgtcgtcaaacattaaagaataatgaacgctatattattcctgaactaaaagaacatgaagataaagtgctaggcagccaatcaaaagcgcttgcacttgagaaacagctttatgaaggcttatttgatcaacttctaccacatttaaaacaatttcagcaactcgctgctagtttaagtgaacttgatgtaattaataacttcgcagaaagagccgaaacgctcaattattgccgcccaactttaattgataatcaagatattactattgttgagggtcgccacccagtggttgaacatgtcatgagtgagccttttattgcaaatccgactcatcttgctccaacacgcaaaatgctgattattactggtccaaatatggggggtaaatcaacctatatgcgtcaaactgcactgattgtattactggcacacgttggttgttttgtccctgctagccaagcaaacattggaatcgtcgaccgaattttcacccgcattggcgcaagtgatgatttagcttcaggacgctcgactttcatggtcgaaatgacagaaacagcgaatattcttaataatgcaactcagcattcattagttttaatggatgaaattggtcgtggtactagtacctacgatggcttatcattagcttgggcaactgcggaatatcttgcacataagatttcagccaaaactctctttgccactcactactttgaattaactgaattagctgaacaagtgccaggattagttaacgttcatttagatgcgattgagcataatgataccattgcttttaaacatacagtattggatggaccagcaagtaaaagttttggtttacaggttgcggccttagcgggcgtgccaaaaagtgtgatcaaacaggctaaacaaaaattaaggctacttgagcaacatcaattagttaacaattcaggtcagtttgatttattaactcaagcaacagttaacttgcctgaaatctcagaagttgaaacccagcttgctgcaataaacccagatgaactaacaccaaaagaagctctggcattactgtaccgcttaaaagagttaggttaa

SEQ ID NO: 4063 - protein, 859 aa, Pseudoalteromonas tunicata D2
MPLDLFSEHTISQQTPMMQQYLRIKAEHRDILLFYRMGDFYELFFDDAKRAAQLLDISQTHRGRAGGAPIPMAGVPYHAVENYLARLVQMGESVAICEQIGDPATSKGPVERKVVRIITPGTISDEALLKERQDNLLTAIYLAKEGTFGIAYLDINSGRFYLTQANTEESCHSILQRIQPAELLYPENFTAMHLISSYKGSRRRPEWEFDLNTASTILCQQFETKDLIGFGVQDAHEALIAAGCLMQYVKDTQRIALPHINAIALEQNELHVILDAATRKNLELTINLSGDIDNTLAQVLDKTATPMGSRLLKRRLHTPTRDHNELNARLDAVSEIMNCGLFNDFYDVLKQIGDIERIVARLALRSARPRDLSRLRNALQQLHLVQNLLAHTSSNRLSDIKRASAVIPHIQSLLEQAIIENPPVLIRDGGVIAPGYHAELDEWRALSQGATDIVEALEAKERERTGIATLKIGYNRVHGFYIEVSRAYADQVPPEYIRRQTLKNNERYIIPELKEHEDKVLGSQSKALALEKQLYEGLFDQLLPHLKQFQQLAASLSELDVINNFAERAETLNYCRPTLIDNQDITIVEGRHPVVEHVMSEPFIANPTHLAPTRKMLIITGPNMGGKSTYMRQTALIVLLAHVGCFVPASQANIGIVDRIFTRIGASDDLASGRSTFMVEMTETANILNNATQHSLVLMDEIGRGTSTYDGLSLAWATAEYLAHKISAKTLFATHYFELTELAEQVPGLVNVHLDAIEHNDTIAFKHTVLDGPASKSFGLQVAALAGVPKSVIKQAKQKLRLLEQHQLVNNSGQFDLLTQATVNLPEISEVETQLAAINPDELTPKEALALLYRLKELG

SEQ ID NO: 4064 - DNA, 2565 bp, Neptuniibacter caesariensis
  CDS (1)..(2565): transl_table=11
atgtcaaaacaaaacgcctctggtcacacacctatgatgcagcagtatttgcgaatcaaggcccaacaccctgatcaacttgtcttttatcgcatgggtgacttttatgagctgttttatgatgacgcaaaaaaagccgccgagctgttagatatttcgttgaccgctcgaggaaagtctgccggtgaaccgattccaatggctggcatcccctaccatgcagctgaaggctatgtgggtaaaattgtcagagcgggtgaatcggttgttatttgtgagcaagtcggagatccagccaccagcaaaggacctgtcgagcgcgctgtcgcacgtatcattacccctggaacggtaagcgacgaagccttgctcgatgagaacagagacaacctgctagtcgccctaaaccaagttggcgatgagtacgggtttgctattgttgatatagcctcagggcgtttcagcctgatgcaagtcgataatcaggacacgttaatcagcgaactggaaagactacgcccctccgaaacgctattcaatgaagaatcgcctctggctactcttttagagaaacgtaaaggattaaggccacaggcaccatggcactttgaatctgacacagcaaatgagttattacgccagcaatttaaagttaaagacctgagtggatttggctgtgatcacctgccggttgctatcaccgctgccggctgcttacttcagtatgcgaaagacacccagagaacagcactaccgcatatacgtcgaattcagatcgagcagcacaatgattgcgtcgcgcttgacgcagccacacgcaagaaccttgaaatagatcaaaacctgtcaggtggttttgataacaccctggctaaagtaatcgacaagtgccgtaccccgatgggaagcagattactacgccgttggttacaccgcccaattcaggacagagctacacttctagcccgacaagcttcaattcagtggttgcaaaacaactacaagtttgaagagatacagaagccgttaaaaaatattggtgatattgaacgtatcctggctcgaattgccctgcgctcagctcgcccgcgcgatcttgagcgtttgaaaagcgctctagcctctctgcctgaattacaaagccagcttaaaacaactgatgctccgcttatctcagaactggcaatacagatttctcagttccctgaactatccgatctgttattaaaagccattattgataacccacctgtcgtcattcgtgatggtggagtcatcgccgaagggtttgacgaagagctggatgagctcagaggtattagcgaaaacgccggcgcatatcttattgaacttgagacacgcgaaagagaaagaaccggcatcgctacccttaaggtaggctataaccgtgttcacggttacttcatagagattggtaaagcacaaaatgcagagttacccgcggaatacattcgacgccaaacccttaagaatgctgaacgatacatcacaccagagctaaaagaatttgaggacaaagcgctttctgccaaaagccgggcactggcacgtgaaaaagcactctatgaacaacttctggaaaccctcgctgcagagctttctcctcttcaggattcatctgctgcgattgctgagctcgatgtcttaaacaaccttgctgaacgcgcctctactctggattatgtgccacccactctcacagaggagccgcagattaaaattcaacgcggtcgccatcctgtcgttgagacagtacttgacgacccgtttgtcgctaatgatctggaccttgataatgaacgcaagatgctgattatcaccggcccaaacatgggtggtaaatccacctatatgcgccaggctgctctcataaccctgcttgctcatattggcagctatgttcctgcatcggcagcaactatcggcattgtggataaaatttttacccggatggggtcatctgacgacctggcaggtgggcgttcgaccttcatggtggaaatgactgaaaccgccaacatcatgcataatgcgacggcgcgaagcctggtattgatggatgaagtgggtcgcggaaccagtacatttgatggtttatccttagcctgggcctgcgcagagaacttagcaagagaaaccaacgctttcaccctgttcgcaacgcactactttgaactgactagccttcctgaccaagcggcaaatgtgttcaatgtacatttgactgcagttgaacataacgaccacatcgtttttctgcatgaagtgaaagatggtcccgccagccaaagctatggattacaggtcgctcagttagcaggtgttcctctgaacgtcattgaacaagcaaaagccaagctaaaccagttggagcaggatgtcgctgttggggcacaaatgatagctccacctccgccagtacaaaacgacatgtttgcagcgccagaacataaagcgatcaaggaactaaaaaagatctcacccgatgatcttagcccgaaacaggctctcgaacacctatatgcgctaaaggatttactataa

SEQ ID NO: 4065 - protein, 854 aa, Neptuniibacter caesariensis
MSKQNASGHTPMMQQYLRIKAQHPDQLVFYRMGDFYELFYDDAKKAAELLDISLTARGKSAGEPIPMAGIPYHAAEGYVGKIVRAGESVVICEQVGDPATSKGPVERAVARIITPGTVSDEALLDENRDNLLVALNQVGDEYGFAIVDIASGRFSLMQVDNQDTLISELERLRPSETLFNEESPLATLLEKRKGLRPQAPWHFESDTANELLRQQFKVKDLSGFGCDHLPVAITAAGCLLQYAKDTQRTALPHIRRIQIEQHNDCVALDAATRKNLEIDQNLSGGFDNTLAKVIDKCRTPMGSRLLRRWLHRPIQDRATLLARQASIQWLQNNYKFEEIQKPLKNIGDIERILARIALRSARPRDLERLKSALASLPELQSQLKTTDAPLISELAIQISQFPELSDLLLKAIIDNPPVVIRDGGVIAEGFDEELDELRGISENAGAYLIELETRERERTGIATLKVGYNRVHGYFIEIGKAQNAELPAEYIRRQTLKNAERYITPELKEFEDKALSAKSRALAREKALYEQLLETLAAELSPLQDSSAAIAELDVLNNLAERASTLDYVPPTLTEEPQIKIQRGRHPVVETVLDDPFVANDLDLDNERKMLIITGPNMGGKSTYMRQAALITLLAHIGSYVPASAATIGIVDKIFTRMGSSDDLAGGRSTFMVEMTETANIMHNATARSLVLMDEVGRGTSTFDGLSLAWACAENLARETNAFTLFATHYFELTSLPDQAANVFNVHLTAVEHNDHIVFLHEVKDGPASQSYGLQVAQLAGVPLNVIEQAKAKLNQLEQDVAVGAQMIAPPPPVQNDMFAAPEHKAIKELKKISPDDLSPKQALEHLYALKDLL

SEQ ID NO: 4066 - DNA, 2553 bp, Desulfitobacterium hafniense DCB-2
  CDS (1)..(2553): transl_table=11
atgaccacaccgatgatgcaacaatacaaatccataaaatctcaagcccctgacgccattctcttcttccgcctgggagacttctatgaaatgtttggcgaggatgcccggaccgccgcccctgttctggaaattgccttaaccggccgtgattccggaggcggggagaggattcccatgtgcggtgttccccaccatgctgtagatggctatctgctcaagctggtttctgccggttataaagtggccttatgcgagcaagtggaggatcctcaagccactaaagggatcgtcagaagagagattatccgaatcatttctcccggtactatgacggattccttagtggagcaagccaataattttttagccgcggtctatcatgatcaggactggggattggcctttgtggatgtttccacaggggagtttacggtttttcagactgaatccatagatatcttaaccaccgagctttcccggattcgtccttccgaattgctgctcccggcggaactcctcaaagcaaagcactggcggccctattatcttactcagcgggaaaagaaaacctatcaacacaccttgctggaacagcgctttacggaacaaaccgagttatttcaggaatttccgacggctatgaaagccgccaatgggctttggcaatatatcctggaaacctcacccggtatcgatccctcccatattctgaagatcaatgcctaccgtcctgagcactggatgctccttgatccctggacccgcagaaatctggagcttaccgagtccattcgcggccaagggaaaaaaggaactttattatccgttctggacttcaccaaaaccgccttcggcggccgcctgctcagacgctggatcgagcagcctttgctccttaaagaggagattgaaaagcgcttggattatgtggaggccttggttgaggatagctttttacggggggaccttatccagctcttcaataaagtgtttgatctggagcgcctcatgggcaaggtttcctatggtaccgccaatgcccgggacttattatccttagctcagaccttaggcgtgctgccccaactccgggctttgctggcggaaggcaagtcggcatccctgcaagcctttattccggccttggaaggtctggatcctttggctgtgaccttagagcaagctattaatccggaagcccccatctccctgaaggacggaaacctgctgaaagccggttattcagaggaaatcgacgaattgcgcagcatatcctccggggggaaagcctgggtagccaaattggaaagtatggaaaaggaccggacaggaattcgctcccttaaggttggatataataaagtatttgggtattatatcgaagtgacacatgccaattcccacctgatacctgctgaatatattcgcaaacaaaccttagccaatgctgagcgttttatcaccccggaattgaaggaatatgaacaaaaaatcctgggcgccgaagagaaagtcacacagctggagtatcagctctttctcgaactccgggaaacagttcgcgggcaggccgctaggattttagaagccgcccatgctctggctgaaatcgacgtctatgccagcctggcggaagccgctgtgcgccatcattattcccgtcctgtgatgaagggagaaggggggctcactatcatcgaggggcggcatcctgtggtggaatccatgcttcaggacacttcctttgtccccaacgataccatcctgactgaggataaacatctggccttgatcaccggccccaacatggccggtaaatccacctacatgcggcaggtagccctgatcgtcctgatggcccagattggcagctttgtacctgcacagcaagccaccattcccatcgctgatcatatctttacccgggtgggggcttccgatgatctggcctcaggacaaagcacctttatggtggagatgtatgaagtggcccatattctgcgccatgtcacaccccatagcctgatcattctcgatgaagtgggacgggggacagccacctacgacggcctcagcattgcctgggcggtggctgagtacttagccggtcaggagaacaaacccaaaactctctttgctacccattatcatgaactgaccgatttggaggaaacccatgccggtatcttcaatcttcatgtcggggttagggaacatggggaagagattgttttcctgcataagattatccccggccgtgccgatcgcagttatggcattcaagtggcaaagctggccggtttgcctgccaatctgctgcacagggccaaaatcattctgcatgagctggaatcctccgccaaggaaaaccgccaggagcatttgctaaataaggagaaggcaacccaactgtccttgttcgaagttcagcccctggaccccctgttgcaggaagtcagcgagctttctgtggaggatttgactcccaggcaggccttggattacctgttcgatttaaaagaacggattaaaacggcggattctatttag

SEQ ID NO: 4067 - protein, 850 aa, Desulfitobacterium hafniense DCB-2
MTTPMMQQYKSIKSQAPDAILFFRLGDFYEMFGEDARTAAPVLEIALTGRDSGGGERIPMCGVPHHAVDGYLLKLVSAGYKVALCEQVEDPQATKGIVRREIIRIISPGTMTDSLVEQANNFLAAVYHDQDWGLAFVDVSTGEFTVFQTESIDILTTELSRIRPSELLLPAELLKAKHWRPYYLTQREKKTYQHTLLEQRFTEQTELFQEFPTAMKAANGLWQYILETSPGIDPSHILKINAYRPEHWMLLDPWTRRNLELTESIRGQGKKGTLLSVLDFTKTAFGGRLLRRWIEQPLLLKEEIEKRLDYVEALVEDSFLRGDLIQLFNKVFDLERLMGKVSYGTANARDLLSLAQTLGVLPQLRALLAEGKSASLQAFIPALEGLDPLAVTLEQAINPEAPISLKDGNLLKAGYSEEIDELRSISSGGKAWVAKLESMEKDRTGIRSLKVGYNKVFGYYIEVTHANSHLIPAEYIRKQTLANAERFITPELKEYEQKILGAEEKVTQLEYQLFLELRETVRGQAARILEAAHALAEIDVYASLAEAAVRHHYSRPVMKGEGGLTIIEGRHPVVESMLQDTSFVPNDTILTEDKHLALITGPNMAGKSTYMRQVALIVLMAQIGSFVPAQQATIPIADHIFTRVGASDDLASGQSTFMVEMYEVAHILRHVTPHSLIILDEVGRGTATYDGLSIAWAVAEYLAGQENKPKTLFATHYHELTDLEETHAGIFNLHVGVREHGEEIVFLHKIIPGRADRSYGIQVAKLAGLPANLLHRAKIILHELESSAKENRQEHLLNKEKATQLSLFEVQPLDPLLQEVSELSVEDLTPRQALDYLFDLKERIKTADSI

SEQ ID NO: 4068 - DNA, 2625 bp, Bacillus sp. SG-1
  CDS (1)..(2625): transl_table=11
atggcgacatacactccaatgattatgcaatacttaaaagtgaaggcagagtatcaagatgcctttttgttttttcgtttaggcgatttttatgaaatgttctttgaggatgcaatcaaagcttctcaggaacttgaaattacattaacgagccgtgaaggcgggggcaccgaacgaatcccgatgtgcggcataccctatcattcagcgcccaattatatagaacagctgattgaaaaaggatataaagtggcaatttgtgaacagacagaagatccgaaacaggcgaaaggcgtcgtgaaaagagaagtcgtacaactgattacaccaggaacagtcatggacggtaaagggctgcaggataaagagaataactatatcgcctctatcagtctatttgacgacaatacggcagcattggcttacagtgacttatcaacaggagaaacgaaggtaactcaattgtccgcaagctttgatgagaccgttaatgaactggcaaccatcggggcaaaggaagtggttgttcattccgagttcgatgaagaactgaaaaggaaacttgttgaccgtacaggtgtcacgatttcttttgaaaatgaaacggacaccaatgaaaactacaggttacttctcgatgatttaaagcaggacaaacttacgaaaacagtttgcagattgttgaactatttattcaggacccagaaaaggagtcttgatcatctgcaaaaagtggaaacctatcaaattcatcagttcatgaagatagattactattcaaagagaaatctggaactaacagaaaccatccgtgctaaaggaaagaaaggttcattgctttggcttcttgatgaaacgatgacagccatgggtgccagaatgctgaaacggtggattgaccgtccattgattgatcagaaagaaattgagaagagacacagcatggttcaacttcttcaggagcggttctttgaacgtgaagatataagggatcttctaaaagaggtctacgacttagaacgtcttgccggaagagttgcatttgggaacgtcaatgcaagggatctcattcagctaagaaaatcacttggccagattcccctgttgaaaaatatcatcggtgaactgggtcacgatattgcggatgaaatcctgaaatccattgatccatgtgatgaacttactggtatgcttcatgattccctccatgatcagccgccgctttctatcaaagaaggaaatatcatcaaagacggctatcacgaagaacttgaccaataccgggatgcaagcagaaacggaaagacatggattgctcagctggaaagagaagagcgcgaaagaaccggcattcgttccctgaaagtcgggtataaccgtgtattcggatattatatcgaagtgaccaaagcgaatctcgggttgttggaagaaggccgttatgagcgcaaacagacactgacaaacgcagaacgctttatcacgccggaattgaaagagaaggaagccctgattcttcaagccgatgagaaaagcattgagctggagtatgacttgttccttaacatcagagaaaccgttaaagaatatataccgcgcttgcagaagctggcaagggtcgttagtgaaattgatgtactgcaatgctttgcgactgtaagtgagaagaggcattatgtgaaaccatcttttaatcgtgatagaaaaatcatgataacagatggacgccatccagttgtggaaaaagtgatggatgcccaggaatatgtaccgaatgactgctacatggatcaggaaagggaaatcttgctggtcaccggaccgaacatgtctggtaagagtacgtatatgaggcagctggcccttacggcaatccttgcccaaatcgggtgttatgtccctgctaaagaggcaagtctgcctatctttgaccaggtgtttacacgaattggagcagcggatgacctaatatcgggacaaagtactttcatggtggaaatgcttgaggcgaaaaatgcaattaccaacgcgacacaggacagcttgattctttttgatgagatcggaagagggacgagcacttatgacggaatggcactggcacaggcaatcattgaatatatacatgagaatattaaggcaaaaactttattctccacgcattatcatgagttgacggttctcgaacaggaattggctaacgtgaagaatattcatgtcagtgcgatggaacataacggaaatcttgtattccttcataaaattaaagagggagcagcggataagagttatggaattcatgtagctcaattggcagagcttcctgaaaacctgattgtcagggcgaatgaaattttggaaaagcttgaacaaaagacagacaacaatcctggacgaaatgcttcttatcagcagacttctaaggttgcagaaaaaacgcaagaagaacagcccgcacagctgtcatttttccaagaggacaaaaaagtacagcagagtggcggcgacctaagtaaaaaagaacgtaagcttattgaagaactaaaatcattcgatattcttgaaatgaatccgttacaggcgatgaatgccctctatgagctccaaaagaaattgaaaaaataa

SEQ ID NO: 4069 - protein, 874 aa, Bacillus sp. SG-1
MATYTPMIMQYLKVKAEYQDAFLFFRLGDFYEMFFEDAIKASQELEITLTSREGGGTERIPMCGIPYHSAPNYIEQLIEKGYKVAICEQTEDPKQAKGVVKREVVQLITPGTVMDGKGLQDKENNYIASISLFDDNTAALAYSDLSTGETKVTQLSASFDETVNELATIGAKEVVVHSEFDEELKRKLVDRTGVTISFENETDTNENYRLLLDDLKQDKLTKTVCRLLNYLFRTQKRSLDHLQKVETYQIHQFMKIDYYSKRNLELTETIRAKGKKGSLLWLLDETMTAMGARMLKRWIDRPLIDQKEIEKRHSMVQLLQERFFEREDIRDLLKEVYDLERLAGRVAFGNVNARDLIQLRKSLGQIPLLKNIIGELGHDIADEILKSIDPCDELTGMLHDSLHDQPPLSIKEGNIIKDGYHEELDQYRDASRNGKTWIAQLEREERERTGIRSLKVGYNRVFGYYIEVTKANLGLLEEGRYERKQTLTNAERFITPELKEKEALILQADEKSIELEYDLFLNIRETVKEYIPRLQKLARVVSEIDVLQCFATVSEKRHYVKPSFNRDRKIMITDGRHPVVEKVMDAQEYVPNDCYMDQEREILLVTGPNMSGKSTYMRQLALTAILAQIGCYVPAKEASLPIFDQVFTRIGAADDLISGQSTFMVEMLEAKNAITNATQDSLILFDEIGRGTSTYDGMALAQAIIEYIHENIKAKTLFSTHYHELTVLEQELANVKNIHVSAMEHNGNLVFLHKIKEGAADKSYGIHVAQLAELPENLIVRANEILEKLEQKTDNNPGRNASYQQTSKVAEKTQEEQPAQLSFFQEDKKVQQSGGDLSKKERKLIEELKSFDILEMNPLQAMNALYELQKKLKK

SEQ ID NO: 4070 - DNA, 2595 bp, Rickettsiella grylli
  CDS (1)..(2595): transl_table=11
atgaaaaatagcaacgatctaaacggtcagcacacgccgatgattcgacaatatttgcaaataaaagcccaacataatgataaattattgttttatcgtatgggcgacttttatgaattattttatgacgatgcgattaaagcggctcatttactaaatattacgttaaccaaacgcggtcaatctgccaatcaagcaattcctatggcgggtgtcccctttcatagtgtagaaagttatttagcgaaattagtcaagttaggtgaatctgtcgctatctgtgaacaaatcggggacccccaccacgctaaaggccctatgaaaagggaagtaacacgcattattacaccgggtacactcagtgatgaagccttattagaaaaaaatcaacgcttgttactggcactctataatcaacatgaacactttggaatttcttactttgacatgggaagcggtcaaattcatattttacaagtcaatggcgaagacgcattggctagtgaattagtccgtcttaaccctgcagaattattaattagtgaagaatttaaaaaagaacacttattagccgcttatcaaaaaacaatccgacaccgtcccgcttgggagttcgattaccataccgcaacccatttattaacccagcaatttaaaacgcgggacctcagcggttttggctgccaggacttacacttggcgatacaagccaccggttgtttattaaattatgtcaaagacacacaacgcacccaattacaacatatccaaccaattcgcatagaacgacgcgaagaaaatgtcctgttagacgccattactcaacgtaatttagaattaacacttaatttacaaggcgaaaaaagcaataccttactgtctattttagacaacaccgcaacaccaatgggaagtcgtttattgcatcgatggctgcatcggcctttacggaagcgattaactataaaatcgcggcaaaccgctattcatcacttattaacgacggaatcctttatcagtttacaggctttattaaaacttttaggtgatcttgaacgcattatttcacgcattggattacgatcggccagaccgcgtgatttaagtcaacttcggttggctttgtctattcttcctgaacttcataataaattgagcacttgttttaatgtgcctacatttaaaaaaaattcagcattacttgtctcattacatcaagaaataaaaacctttcctcaattatttcgcttattacaagaagcgcttgttgaagaccctccagcaatgacgcgtgaaggtggaatgattgcgaaagggtatcattgtgaacttgatgagctcaaaaatttaagtgcacataccggacaatttttaattgatttagaaaaaaaagaacgtgcgctttccgggattagcacacttaaaattggcttcaatcgcgtttcaggatactacatcgaaataagccgtggacaatccaaactggctccctctcactatatccgtcgacaaacattgaccaacgttgaacgttttattactcctgagctcaaagaatttgaagataaaattctaagcgctcattctaaagcgctccatttagaaaaaacactttatgatgaactactcgataaaataagcttttatctggctgatttacaaaaaaccacgaatgcgctcgccgaactagatatattagtttgctttgcagaacgggctgcaacactccatttgatctgcccttcattaactaaaaaaccaggtatttatatcgaagagggacgacatttggtgatcgaacacgccttagatattccttttatcgccaatagctgtcatttaacgcctaaacaacgtttattaattattacagggcccaacatgggcggaaaatcgacttatatgcgtcaaacggctttaatttgtttattagccatgatcggttgttttgtgcctgcaaaaagcgctacgataggcccaattgatcgaatttttactcgaattggagccgcagatgatcttgcgagtggccgctcaacctttatggtcgaaatgacagaaacagcgtccattttacataatgcaacggaagaaagcttagtcattatggatgaaattgggcgcggtaccagtacttttgatggtcttgccttagcgttttcttgtgctgaatatctcgctcagcatattaaagcttacactttatttgcaacgcactattttgaattaactcgattaacggaagaaaatacatttataacgaactgtcatgttaatgcgagagagcataacgatactattatttttttatataccatcgaaaaggggcctgccaatcaaagctatggattacacgtcgctcagttagctggtgttcccaagcccgttattcaacgggccaaacaaaaattaacagaacttgaacaaaatacaatcgtcacgaataagccatgtccaagcaccacttcaccgaaggtgtctatcaatcctgatattataaagcttcttgaacaagtcgatccggatcaattagcacccaaagaggcgcttgaaatcatttatcgattaaaatccttacaaggaattcctgtatga

SEQ ID NO: 4071 - protein, 864 aa, Rickettsiella grylli
MKNSNDLNGQHTPMIRQYLQIKAQHNDKLLFYRMGDFYELFYDDAIKAAHLLNITLTKRGQSANQAIPMAGVPFHSVESYLAKLVKLGESVAICEQIGDPHHAKGPMKREVTRIITPGTLSDEALLEKNQRLLLALYNQHEHFGISYFDMGSGQIHILQVNGEDALASELVRLNPAELLISEEFKKEHLLAAYQKTIRHRPAWEFDYHTATHLLTQQFKTRDLSGFGCQDLHLAIQATGCLLNYVKDTQRTQLQHIQPIRIERREENVLLDAITQRNLELTLNLQGEKSNTLLSILDNTATPMGSRLLHRWLHRPLRKRLTIKSRQTAIHHLLTTESFISLQALLKLLGDLERIISRIGLRSARPRDLSQLRLALSILPELHNKLSTCFNVPTFKKNSALLVSLHQEIKTFPQLFRLLQEALVEDPPAMTREGGMIAKGYHCELDELKNLSAHTGQFLIDLEKKERALSGISTLKIGFNRVSGYYIEISRGQSKLAPSHYIRRQTLTNVERFITPELKEFEDKILSAHSKALHLEKTLYDELLDKISFYLADLQKTTNALAELDILVCFAERAATLHLICPSLTKKPGIYIEEGRHLVIEHALDIPFIANSCHLTPKQRLLIITGPNMGGKSTYMRQTALICLLAMIGCFVPAKSATIGPIDRIFTRIGAADDLASGRSTFMVEMTETASILHNATEESLVIMDEIGRGTSTFDGLALAFSCAEYLAQHIKAYTLFATHYFELTRLTEENTFITNCHVNAREHNDTIIFLYTIEKGPANQSYGLHVAQLAGVPKPVIQRAKQKLTELEQNTIVTNKPCPSTTSPKVSINPDIIKLLEQVDPDQLAPKEALEIIYRLKSLQGIPV

SEQ ID NO: 4072 - DNA, 2667 bp, Cyanothece sp. PCC 8801
  CDS (1)..(2667): transl_table=11
atgactatttcgacgaccgactctaatcctaacccaccgcttggtaatagtaaatctccccacaaggattatcgtccccttgatcccgaaaaactgaccccaatgtatcagcattatgtgatggtcaaagaacaatatcctaatgctttattattgtatcgggtcggagacttctttgaatgcttttttcaagatgcggtgacgatttctcaggaattagaattagttttaaccagcaaagaagggggaaaagaaattggacgggtagccatgacaggggttcctcaccatgcgttagatcgttatagtcggttattagtagaaaaaggctatgctgtggctatttgtgatcaagttgaagactcagcagaagcagccgcccaaggacgtattgttgaacgaaaaatcaccaaattgctgaccccaggaaccttaaccgatgagggaatgttacctgctaagcgtaacaattttttagctgccattgtaatcgcgggaaaccattggggactagcttatgcagacatttcaacaggggaattttttaccacccaatcccaagatattgctaatctaaacttagaattattacgactgcaaccgtcagaaattttaatccccactaatgccccggatattaatagtttactgcgtcccggggaaaaatccgagtatttagtggatggtttgcccgactgtttttgttattccctgcgatcgcaaactcatttcagtttaaatgaagccaaacctcgattattaattacctttaatatccgttccctcgaaggaatgggatgcgaacatttacccctagctattcgcgccgcaggagggctattacaatacattgaagatacccagaaagcccatcaagttcccctacaacccctacgaacttacaatcaggttgattttctcattttggatcatcaaacccgccgtaacctcgaaataacccaaacggtaagagatggaacgttttatggttcattattatgggcaattgatcggacttgtacggcgatgggaggacgagcactccgtcgttgggtattggaacctttattgacgattaaaggcattgaagcgcgacaaaataccatccaagaattagtagaaaacccctctctaaggcaagatttacgtcagttattacgcagtatttatgacttagaacgtattactgggagggtaggttcaggaactgctaatgccagagatttattatccttagctgagtcattagtaaggttaacagacctagcggaattagcccatcaaggcacttctccctatctaaaagcattacaaaaaattccccctgaattagaacaattaggtaagtatgttattgatcatttagtagaatctccccctctccatttaaaagatgggggagtcattcgtgatggcattaatactgacttagatgccatgcgtcagcgtctcgatgatgatcgtcaatggttagccaatttggaactaaccgaacgacaaaaaacaggagtctctaacttaaaagttggctacaataaaacctttggttactatatcagtctgccccgtagcaaagccgaattagcccccaagaattacgttagaaaacaaacgctaactaacgaagaaaggtatattactcctgaattgaaggaacgagaaactcgtattttaaccgcacaagatgatctcaatcaattagaatacgaaatcttcacacaattgcgctcaaaagtagctgaaaaagggcaagaaattcgcagtattgctaaagcagtagccgccattgatgtcttagccgggttagcagaagttgccgtttatcaaggctattgtcgtcctgaaattgtcgaaggaagggcaatagaaattactgagggaagacatcccgttgttgaacaatctttagccgccgggttgttcgttcctaattcaactaaaatggggaatactgaagccaataattaccctgatttaattattttaacgggtccaaatgccagtggaaaaagttgttatttaagacaagtgggactgattcaattaatggcacaaaccgggagttttgttcctgctaaaagtgcaaaattagggattagcgatcgcatttttacccgtgtcggggcagtggatgatttagccacaggacaatcaacctttatggtagaaatgaatgagacagctaatattctcaatcatgggacaaataagtctttaatattattagatgaaattggaagaggaacggctacctttgacggactttctattgcttgggcagtggcagaatatttagcaaccgaagttaaaggaagaacaatttttgctacccattaccatgaattaaatgaattagcgtctatcctttctaacgtcgctaactatcaagtaaccgtacaagaattgcccaatgaaatcatctttttacaccaagttcgtccagggggtgcagataaatcttacgggatagaagcaggaagattagcaggtttaccgagttcagtgattaaacgggcaaaacaagtgatgagtcagatcgaaaaacatagtaaaatagcgttaggattacgcaaaggaattaaaaaagttaaccctgttaaacaaacagaaattcaaggggaattgatcgaacaattagatatttttggagatagtgaatcacggtag

SEQ ID NO: 4073 - protein, 888 aa, Cyanothece sp. PCC 8801
MTISTTDSNPNPPLGNSKSPHKDYRPLDPEKLTPMYQHYVMVKEQYPNALLLYRVGDFFECFFQDAVTISQELELVLTSKEGGKEIGRVAMTGVPHHALDRYSRLLVEKGYAVAICDQVEDSAEAAAQGRIVERKITKLLTPGTLTDEGMLPAKRNNFLAAIVIAGNHWGLAYADISTGEFFTTQSQDIANLNLELLRLQPSEILIPTNAPDINSLLRPGEKSEYLVDGLPDCFCYSLRSQTHFSLNEAKPRLLITFNIRSLEGMGCEHLPLAIRAAGGLLQYIEDTQKAHQVPLQPLRTYNQVDFLILDHQTRRNLEITQTVRDGTFYGSLLWAIDRTCTAMGGRALRRWVLEPLLTIKGIEARQNTIQELVENPSLRQDLRQLLRSIYDLERITGRVGSGTANARDLLSLAESLVRLTDLAELAHQGTSPYLKALQKIPPELEQLGKYVIDHLVESPPLHLKDGGVIRDGINTDLDAMRQRLDDDRQWLANLELTERQKTGVSNLKVGYNKTFGYYISLPRSKAELAPKNYVRKQTLTNEERYITPELKERETRILTAQDDLNQLEYEIFTQLRSKVAEKGQEIRSIAKAVAAIDVLAGLAEVAVYQGYCRPEIVEGRAIEITEGRHPVVEQSLAAGLFVPNSTKMGNTEANNYPDLIILTGPNASGKSCYLRQVGLIQLMAQTGSFVPAKSAKLGISDRIFTRVGAVDDLATGQSTFMVEMNETANILNHGTNKSLILLDEIGRGTATFDGLSIAWAVAEYLATEVKGRTIFATHYHELNELASILSNVANYQVTVQELPNEIIFLHQVRPGGADKSYGIEAGRLAGLPSSVIKRAKQVMSQIEKHSKIALGLRKGIKKVNPVKQTEIQGELIEQLDIFGDSESR

SEQ ID NO: 4074 - DNA, 2658 bp, Cyanothece sp. PCC 7424
  CDS (1)..(2658): transl_table=11
atgagcatctctccagagtctccagagataaccccagaaattgccaccagtaaatctcctcataccgactatcgtcaactcgatcgcactaaattaacccccatgtatcaacattatgtggaggtaaaagaacaatatcccaacacattattagtctatcgagtcggagacttttttgagtgtttctttcaagatgcggtaacgatcgcccaagaactggaattagttctcaccagtaaagatggagggcgagaaataggacgcatagcgatgaccggagttccccatcatgccctagaacgatatagtagactgttggtagaaaaagggtatgctgtcgctatttgcgatcaagtagaagactctgctgctgctgctgccgccgggcggatggtagaaagacaaataactaaacttctcacccccggaacgttaaccgatgaggggatgttacaggcgcggaaaaataattatttagcggcagtggttattgccaaagatcattgggggttagcttatgcggatatttctactggggaatttttaacgactcaatctaatcatttatcctccctcacattagaattattacgtctgcaaccctcagaaattttaattcccactaatgcccccgatcttaatactttactccgaccgggggaaaagtcggactatttagcagactgtttacccgactgtttttgttattctttgcgatcgcaatttccctttacccttaatgaagcaaaaccgagacttttaaccacttttcgagttaaatctttagaagggttaggatgtgaacatttacccttagctattcgggcagccggtgggttattagaatatatagaagatacccaaaaagcctatcaagtccccttacaacccctaaaaacttataacattgctgaatttttaatattagattatcccagtcgtcgcaatttagaaattacccaaactgtcagagataatagtttttatggatcgttattgtgggcattagaccggacagttaccgcaatgggaggtagggcgctgcgtcgttggttaatagaaccgttattagatataaaaggcattaccgcccgacaaaatacgattgaagagttaaaagaaaacccgactttacgtcaagatttgcgtcaattattgcgagagatttatgatttagaacggataacaggacgagtcggggcaggaacagccaacgctagagatttactggctttagcccaatctttagttaaattaacggatttatctcaattagccagtttaggaacttctccttatttacgggcattacaaaaagttccttcagagttagaaatattaggaaaagaggtgatcggccatttggtggagtctcccccattgcatctgaaagaggggggagttattcgagatgggattaattttcaactcgatgaaatgcgtcgcctttatgaagaagatcagcaatggttggcaaatttagaagtaacagaaagacaacgaacaggagtttctaatttaaaggtaggttataacaaaacctttggttattatctcagtatgccccgatcgaaagcggaacaagcacccgataattatatccgcaaacagacattaaccaatgaagaacggtacataacccccgaattaaaagaaagggaaagtcgtattttaaatgctaaagatgatttaaaccgattagaatatgaaatttttgccggtttgaggactaaagtggctgaaaaagccgcagaaattcgtcaagtagcgaaggcagtggcagcgatcgatgttttagcggggttagcagagatcgccgtttatcaagactactgtcgtccggaaatggtagacggaagactaatagaaatagtcgatggcagacatccggttgtggaacagtctttaggggcaggtttttttgtgccgaattcaacttatttagggagtttattggaggagcaaaattatccggatttaatcattttaactggcccgaatgcgagtggaaaaagttgttatttaaggcaagtgggattaattcaattgatggcacaaattgggagttttgttcccgctaaaaccgctaaattagggatctgcgatcggatttttacccgggtgggggcgatggatgatttagccaccggacagtcaacttttatggtagaaatgaatgagacggctaatattttgaatcatgctacgtctcgatcgttggttttattagatgaaattggcagaggtacagcaacatttgacgggttatctattgcctgggcggtagcggaatatttagccgcagaaatacaatctagaaccatttttgctacccattatcatgagttaaatgagttagcttctatattatctaatgtggcaaattatcaagttaccgttaaagaaatgccgaatgaaattatcttcttacatcaagttcgtccggggggtgcagataaatcttatgggatagaagccgggcggttagcaggtttaccggcggtagtgatcgatcgggctaaacaggtgatgactcagatcgaaaaacatagtaaaattgcgttaggattgcgtcaaggaatagaaaaagttaatccagttaaaagtaaaaagtcaaaggataaattgattgaacaattagatatttttgaagaataa

SEQ ID NO: 4075 - protein, 885 aa, Cyanothece sp. PCC 7424
MSISPESPEITPEIATSKSPHTDYRQLDRTKLTPMYQHYVEVKEQYPNTLLVYRVGDFFECFFQDAVTIAQELELVLTSKDGGREIGRIAMTGVPHHALERYSRLLVEKGYAVAICDQVEDSAAAAAAGRMVERQITKLLTPGTLTDEGMLQARKNNYLAAVVIAKDHWGLAYADISTGEFLTTQSNHLSSLTLELLRLQPSEILIPTNAPDLNTLLRPGEKSDYLADCLPDCFCYSLRSQFPFTLNEAKPRLLTTFRVKSLEGLGCEHLPLAIRAAGGLLEYIEDTQKAYQVPLQPLKTYNIAEFLILDYPSRRNLEITQTVRDNSFYGSLLWALDRTVTAMGGRALRRWLIEPLLDIKGITARQNTIEELKENPTLRQDLRQLLREIYDLERITGRVGAGTANARDLLALAQSLVKLTDLSQLASLGTSPYLRALQKVPSELEILGKEVIGHLVESPPLHLKEGGVIRDGINFQLDEMRRLYEEDQQWLANLEVTERQRTGVSNLKVGYNKTFGYYLSMPRSKAEQAPDNYIRKQTLTNEERYITPELKERESRILNAKDDLNRLEYEIFAGLRTKVAEKAAEIRQVAKAVAAIDVLAGLAEIAVYQDYCRPEMVDGRLIEIVDGRHPVVEQSLGAGFFVPNSTYLGSLLEEQNYPDLIILTGPNASGKSCYLRQVGLIQLMAQIGSFVPAKTAKLGICDRIFTRVGAMDDLATGQSTFMVEMNETANILNHATSRSLVLLDEIGRGTATFDGLSIAWAVAEYLAAEIQSRTIFATHYHELNELASILSNVANYQVTVKEMPNEIIFLHQVRPGGADKSYGIEAGRLAGLPAVVIDRAKQVMTQIEKHSKIALGLRQGIEKVNPVKSKKSKDKLIEQLDIFEE

SEQ ID NO: 4076 - DNA, 2922 bp, Magnetospirillum gryphiswaldense
  CDS (1)..(2922): transl_table=11
atgatgcgacgacagcaccgacagatcggcacgactgaaaccgtcggccagcaaacggtcaatggcggcctggaaatgagcgcggtcggcaaaggttcccaccacttcgcgggcgataggggcatgggtgtcggtggcggtcaaagacccctcctgatcagtattgggggcaggtattgtgcgccatcgtcacgcgcttgcatagggggcaggggttgcgaagcggcaccagcatgctaccttgcccgatccgccgcccaaccggacccgcatgccgtgaccgaaccgaccatccccgccgatgccacgccgatgatggcccaatacctggccatcaaacacgcccatcccgattgcctgctgttctatcgcatgggcgatttctacgaattgttcttcgacgacgcggtcaaggcggcggcggccctggatatcgcgctgaccaagcgcggcaagcatctgggtgaggacatcgccatgtgcggcgtgccggtacggtcgtacgaggcctatctgtcgcggctggtgcgcgccggctacaaggtggccatcggcgaacagaccgaagacccggcggaagcgaagaagcgcggcgccaaatcggtggtgtcgcgcgacgtggtccgcgtcatcaccgccggcaccctgaccgaggacaatcttctcgatgcccggtcgcacaattatctggccgccctggccgaggcgggcggcgggttggggctggcctgggtcgatgtctccaccggcgatttcgccatgcagcccttggccccgcccttgctgtccgccgccctggcccggcttgatccgggcgaattgttggtgcccgaacggctgctcaaccaaccggacctgcttgaggcgtggagcgagtggaaaaccatcctgacgccgctgcccagcgtccgtttcgattccgaaaattcccgcagacggcttgaggccttgtatggcgttggcgcccttgacgctttcggtgccttcggtcgggccgaactggccgccggcggcgccctggtcgattacatcgagctgacgcaaaagggcaagctgccgcgtctcaacccgccgcagcgtctggcccagggcgcggtgatggaaatcgatggcgccacccgtcgtaacctggaactggcggaaaccctgaccggcgagcgcaagggatcgctgctggcgaccatcgaccgcacggtgaccggggcgggggcgcggctgctggcggcacatctggccgcacccttgaccgatccggcggccatcgatcgccgcctggacgcggtggccttcttcgtcgagcatgaagacgtgcgcgaggccgtgcgcgccgccctgaagcgctgccccgacatcgagcgcgccctgtcgcgcctgagcctggggcgcggcggtccacgcgatctggccgccatccgcgacgccctggcggaaatcccgtccttgcgcggtctgatcgcgcggccggccctggatgcgccgccgccggccattgcccaggcgacccagggattgggggaacattccaccctggtcgacatcctgacccgcgccttggccgaggaattgccgcttctggcccgcgacggcggcttcatccgccccgagttccatgccggcctggatgaactgaaaagcctgaaggccgagggcaacgctcatctgatgcggttggaacggcgctatgccgaggaaaccggcatccaggccctgaaaatccgccacaacaacatcatcggccatcatatcgaggtgccggccaagcaggcggacaagctggatgaaaatttcatccaccgccagaccatggccaatgcggcgcgctacaccaccaccgaactgatcgaactggccggcaagctgaccggcgccgccgatcgtgccttggccatggaacagcacttgttcagccaattggtgggcgaggttaccgggcgcgcccatgacatcgctgatgccgccgccagcctggctgccctcgacgtggctgcggccctggccgaactggcgtcggcggaaaactgggcacggcccgtggtcgacgacagtcatgccttcgtcatcgacgggggccgtcatccggtggtggaagccgccttgcgtgcggtcaaccacagcgccttcgtcgccaatgattgcgatctgtcggcgggtaaccgcctgtggctgatcaccggccccaacatggccggtaaatccaccttcctgcgccagaacgcggtcatcgccatcctggcgcagatgggcgccttcgtcccggcccgggccgcccgtatcggcgtggtcgaccgtttgttttcccgcgtcggcgccgccgacgatctggcgcggggacggtccaccttcatggtggaaatggtggaaaccgccgccatcctcaaccagtccggcccacgcgccctggtgattttggacgagatcgggcgcggcaccgccactttcgacggtctctccatcgcctggtcggtggtcgagcatctgcacgaggtgaacagatgccgtgccctgttcgccacccattaccacgagctgaccagcctgtcggggcggctgagggatctgtcgtgtcggcagatgcgggtgaaggaatggcaaggcgacgtggtcttcctgcacgaagtggcgcaaggcgccgccgaccgctcgtacggcattcatgtgggccggctggccgggctgccgccagccgtcgttgcgcgagcggaagaagtcttgtcggctctggaaaagggcgaacagggtagcgccgtggccaaattggccgatgatttgccgctgttcgccgccctggccaaacccaagcccaaggagagtgtggcggcggagccgtcgccgctggcggaaaagctgaaggaaatcaatcccgacgagctcagtccgcgccaagccctggatctgctttacgacctgaaacggttactgtga

SEQ ID NO: 4077 - protein, 973 aa, Magnetospirillum gryphiswaldense
MMRRQHRQIGTTETVGQQTVNGGLEMSAVGKGSHHFAGDRGMGVGGGQRPLLISIGGRYCAPSSRACIGGRGCEAAPACYLARSAAQPDPHAVTEPTIPADATPMMAQYLAIKHAHPDCLLFYRMGDFYELFFDDAVKAAAALDIALTKRGKHLGEDIAMCGVPVRSYEAYLSRLVRAGYKVAIGEQTEDPAEAKKRGAKSVVSRDVVRVITAGTLTEDNLLDARSHNYLAALAEAGGGLGLAWVDVSTGDFAMQPLAPPLLSAALARLDPGELLVPERLLNQPDLLEAWSEWKTILTPLPSVRFDSENSRRRLEALYGVGALDAFGAFGRAELAAGGALVDYIELTQKGKLPRLNPPQRLAQGAVMEIDGATRRNLELAETLTGERKGSLLATIDRTVTGAGARLLAAHLAAPLTDPAAIDRRLDAVAFFVEHEDVREAVRAALKRCPDIERALSRLSLGRGGPRDLAAIRDALAEIPSLRGLIARPALDAPPPAIAQATQGLGEHSTLVDILTRALAEELPLLARDGGFIRPEFHAGLDELKSLKAEGNAHLMRLERRYAEETGIQALKIRHNNIIGHHIEVPAKQADKLDENFIHRQTMANAARYTTTELIELAGKLTGAADRALAMEQHLFSQLVGEVTGRAHDIADAAASLAALDVAAALAELASAENWARPVVDDSHAFVIDGGRHPVVEAALRAVNHSAFVANDCDLSAGNRLWLITGPNMAGKSTFLRQNAVIAILAQMGAFVPARAARIGVVDRLFSRVGAADDLARGRSTFMVEMVETAAILNQSGPRALVILDEIGRGTATFDGLSIAWSVVEHLHEVNRCRALFATHYHELTSLSGRLRDLSCRQMRVKEWQGDVVFLHEVAQGAADRSYGIHVGRLAGLPPAVVARAEEVLSALEKGEQGSAVAKLADDLPLFAALAKPKPKESVAAEPSPLAEKLKEINPDELSPRQALDLLYDLKRLL

SEQ ID NO: 4078 - DNA, 2562 bp, Klebsiella pneumoniae
  CDS (1)..(2562): transl_table=11
atgagcacaattgacaatctcgacgcccacacgccgatgatgcagcagtatctcaagctaaaggcgcaacatcctgacattctgctgttttaccggatgggggatttttacgagctattttatgacgatgcgaaacgcgcctcgcagctgctcgatatctcgctgaccaagcgcggcgcctccgcgggcgaaccgatacccatggccggcatcccccaccacgccgtagagaactacctcgccaaactggtcaatcagggcgagtcggtggccatttgcgagcagattggcgacccggccaccaccaaggggccggtcgagcgtaaagtggtgcgtatcgtcaccccgggcaccattagcgatgaagcgctgctgcaggagcgccaggacaacctgctggccgccatctggcaggacagcaaaggcttcggctacgcgacgctggatatcagctccgggcgctttcgtctgagcgaaccggccgaccgcgaaaccatggcggcagagctgcagcgcaccaacccggcggaactgctgtatgcggaagattttgccgaatcgtcgctgatcgagggccgccgcggtctgcgccgtcgcccgctgtgggaatttgaaatcgacaccgcgcgccagcagctaaacctgcagttcggcacccgcgatctggtcggcttcggcgtcgaaaacgccccgcgcggcctgtgcgccgccggctgcctgctgcagtatgtcaaagacacccagcgtacctcgctgccgcacatccgctccatcaccatggaacgccagcaggacagcatcattatggatgccgccacccgccgtaacctcgagatcacccagaatctggccggcggcaccgacaacaccctggcctcggtactcgactctacggtgacgccgatgggtagccggatgctcaagcgctggctgcatatgccggtccgcgataccgccgtgctggtggagcgccagcagaccatcggcgcgctgcaggagcgctataccgagctgcagccggtgctgcgccaggtcggcgatctggagcgtattctggcgcgtctggcgctgcgtaccgcccggccgcgcgatcttgcccgcatgcgtcatgccctgcagcaactgcctctgctgcgtgagctgctggccgacgttgacagtcagccggtgcaaaaattgcgcgagaaaatgggcgagttcaccgaactgcgcgaactgctggagcgcgcggtgatcgacgccccgccggtgttggtccgcgacggcggggtcatcgccccgggctatagcgaagagctggacgagtggcgggcgctggccgatggcgccaccgattatctcgataagctggagatccgcgagcgcgagcggctgggcctcgataccctgaaagtcggctacaacgccgtccacggctactatatccagatcagccgcggccagagccacctcgcgccgatccactacgtgcgccgccagacgctgaaaaacgccgaacgctacattattcctgagctgaaggaatacgaagataaggtgctgacctccaagggcaaagcgctggcgctggaaaaacagctttatgacgaactgttcgacctgctgctgccgcatctcgccgatctgcaaaccagcgccagcgcgctggccgagctggacgtgctggtcaacctggcggaacgtgcggaaaccctgaactattgctgcccgacctttagcgataagccaggcattcgcattagcgaaggccgtcacccggtggtcgagcaggtgctgaaagagccgtttatcgctaacccgctgcagctggcgccgcagcggcggatgctgatcattaccgggccgaacatgggcggtaaaagtacctatatgcgccagaccgcgctgattgcgctgctggcctatatcggcagctacgtcccggcgcagaaagtagaaattggcccgatcgatcgcatcttcacccgcgtcggcgcggcggatgacctggccagcggccgctcgacctttatggtggagatgactgaaaccgccaatatcctgcacaatgccaccgagcatagcctggtgctgatggatgagattggccgcggcacgtccacctacgatgggctatcgctggcgtgggcctgtgcggaaaatctggccaacaaaatcaaggcgctgaccctgttcgccacccactacttcgagctcacccagctgccggagaaaatggaaggcgtcgccaacgtccacctcgacgcgctggagcacggcgataccatcgcctttatgcacagcgtgcaggacggcgcggccagcaagagctatggcctggcggtcgccgcgctggcgggggtgccgaaagaggtgatcaagcgcgcgcggcagaaactgcgcgagctggaaagtatctcgcccaacgcggcggcgacccaggtcgacggcacgcagatgtcgctactcgccgccccggaagagacctcgcctgcggttgaggcgctggagaatcttgatccggactccctgaccccgcgtcaggcgctggagtggatctaccgtctgaaaagcctggtctag

SEQ ID NO: 4079 - protein, 853 aa, Klebsiella pneumoniae
MSTIDNLDAHTPMMQQYLKLKAQHPDILLFYRMGDFYELFYDDAKRASQLLDISLTKRGASAGEPIPMAGIPHHAVENYLAKLVNQGESVAICEQIGDPATTKGPVERKVVRIVTPGTISDEALLQERQDNLLAAIWQDSKGFGYATLDISSGRFRLSEPADRETMAAELQRTNPAELLYAEDFAESSLIEGRRGLRRRPLWEFEIDTARQQLNLQFGTRDLVGFGVENAPRGLCAAGCLLQYVKDTQRTSLPHIRSITMERQQDSIIMDAATRRNLEITQNLAGGTDNTLASVLDSTVTPMGSRMLKRWLHMPVRDTAVLVERQQTIGALQERYTELQPVLRQVGDLERILARLALRTARPRDLARMRHALQQLPLLRELLADVDSQPVQKLREKMGEFTELRELLERAVIDAPPVLVRDGGVIAPGYSEELDEWRALADGATDYLDKLEIRERERLGLDTLKVGYNAVHGYYIQISRGQSHLAPIHYVRRQTLKNAERYIIPELKEYEDKVLTSKGKALALEKQLYDELFDLLLPHLADLQTSASALAELDVLVNLAERAETLNYCCPTFSDKPGIRISEGRHPVVEQVLKEPFIANPLQLAPQRRMLIITGPNMGGKSTYMRQTALIALLAYIGSYVPAQKVEIGPIDRIFTRVGAADDLASGRSTFMVEMTETANILHNATEHSLVLMDEIGRGTSTYDGLSLAWACAENLANKIKALTLFATHYFELTQLPEKMEGVANVHLDALEHGDTIAFMHSVQDGAASKSYGLAVAALAGVPKEVIKRARQKLRELESISPNAAATQVDGTQMSLLAAPEETSPAVEALENLDPDSLTPRQALEWIYRLKSLV

SEQ ID NO: 4080 - DNA, 2649 bp, Microcystis aeruginosa PCC 7806
  CDS (1)..(2649): transl_table=11
atgactctcccctcggattttcccctagaaccaccggctaccaataaagatccccatcgtgattatcgcggactcgatcgcgataaactcacccccatgtaccagcattatgtggaggtaaaagaaacctatcccaatgctcttttactctatcgtgtgggcgattttttcgagtgtttctttcaggacgcggtgattatctccagagaattggaattagttctcaccagcaaggaagggggtaaagggattgggagagtcgccatgaccggggttccccaccacgccctagagcgctatagtcgtttattggtggaaaaaggctatgcggtggcgatttgtgaccaagtagaggattcgacggaagcagccgccgaaaaacgactcgtagaacgcgctatcaccaaactgctcacccccggaaccctcactgatgagggaatgttaaacgcaaaaaagaataattttctggctgcagtggtgattaccggagaaaattggggattagcctatgcagacatctccaccggagaattctacaccacccaagccagcgatttaacggctttaagcctagaattaacccgtttacagccctcagaaatcctttttcccatcaatgcccccgatttaaaccgtattttgcgtcccggggaaaaatccgaccatctccccccctgtttacccgatagtttttgttattccctccgtccccaaactatctttactctcacagaagcgaaaaatcgtctcctaatcacctataaaatgcgttccctagaggggatgggctgcgaacatttacccctcgccattcgcgcagctgggggcctattagaatacattgaagatacccaaaaagccaatcaagtccccctacaacctttaaaaacctactctatctcggaatttttgattttagatgggcaaacccgtcgcaaccttgaaattacccaaacggtgcgcgatggtagcttctatggttctctattatgggcgatcgatcgtacttgtacggccatgggtagtcgcgctttacgtcgttggttactgcaacccctcttagattctcgcggtattcgcgcccgtcaagatactatccaagagttaaaggataatcccgccctgcgccaagatattcggcaaaaattaagggaaatctacgatatagaacgtttaagcggtcgcgttggcgcaggaacggctaacgcccgcgatttactttccctagcggcatctttagtcaaattagccgatttagcggctttggttgcttcgggaaattcgccctatttgaaagctttacagcaaattcccgccgatttggaaaaattaggccagcaggtgatagcgcatctggtggaatctcctccgctgcatctgaaggaagggggggtgattcgtgagggaattgatgcccaattggatgccctgcggcgcgactatcaggaagtaatcgattggtttaagaatctggagacgacagagaaagaaagaacgggtattagtaaccttaaggttaattataacaaaactttcggttattatatcagtttaccccgcagtaaagctgatttcgccccaaaagagtatgtgcgtaagcaaactttggtcaatgaggaacgttatatcaccaccgagttaaaggagaaagaaaatataattctgacggcagtagatgaattaaataacctagaatacgagatttttagcgatttacgccgtcaagtggccgaattttccccagaaatccgggaagtggccacaaaagtcgccgctttggatgtgttggcagcattggcagaaatcgccgtttatcagggatattgtcgcccggaaatcgccgatggtcgtcttatcgatattaaagatggtcgtcatcccgtggtggaacaatcccttggggccggcttttttgtgccgaattcgattaatttgggcaatcaggaaggtttagaatatcctgacttgattattctcaccggtcccaatgctagtggcaaaagttgttatctgcgacaggtgggattaattcaattgttggcccaaaccggcagttttgtcccggcaaagtcggccaaaatctccatctgcgatcgcattttcacccgggtgggggctgtggatgacctcgctactggccaatccacctttatggtggaaatgaacgaaactgccaatattctcaatcacgccacagacagatcattagtattattagacgaaattggccggggtacagccacttttgacggtttatccatagcttgggctgtggcggagtatttagccacggtactgcaatcgcggacgattttcgccactcactaccacgaactgaacgaattagcttcaattttagagaatgtggctaattatcaggtaacagtcaaagaattaccccatgagatagtatttttgcaccaagtacgaccgggaggcgcggataaatcctacggtatcgaagcggggagattagccggtttaccagcttctgtgatcgatcgtgccatgcaggtgatgggtcaaatcgaaaaacatagtaaaattgcgatcggtttgcgtcaaggaattaagaaaattaaaccagttaagtcggataattccccctctctgcagcagttagatatttttgatgacagtaagtag

SEQ ID NO: 4081 - protein, 882 aa, Microcystis aeruginosa PCC 7806
MTLPSDFPLEPPATNKDPHRDYRGLDRDKLTPMYQHYVEVKETYPNALLLYRVGDFFECFFQDAVIISRELELVLTSKEGGKGIGRVAMTGVPHHALERYSRLLVEKGYAVAICDQVEDSTEAAAEKRLVERAITKLLTPGTLTDEGMLNAKKNNFLAAVVITGENWGLAYADISTGEFYTTQASDLTALSLELTRLQPSEILFPINAPDLNRILRPGEKSDHLPPCLPDSFCYSLRPQTIFTLTEAKNRLLITYKMRSLEGMGCEHLPLAIRAAGGLLEYIEDTQKANQVPLQPLKTYSISEFLILDGQTRRNLEITQTVRDGSFYGSLLWAIDRTCTAMGSRALRRWLLQPLLDSRGIRARQDTIQELKDNPALRQDIRQKLREIYDIERLSGRVGAGTANARDLLSLAASLVKLADLAALVASGNSPYLKALQQIPADLEKLGQQVIAHLVESPPLHLKEGGVIREGIDAQLDALRRDYQEVIDWFKNLETTEKERTGISNLKVNYNKTFGYYISLPRSKADFAPKEYVRKQTLVNEERYITTELKEKENIILTAVDELNNLEYEIFSDLRRQVAEFSPEIREVATKVAALDVLAALAEIAVYQGYCRPEIADGRLIDIKDGRHPVVEQSLGAGFFVPNSINLGNQEGLEYPDLIILTGPNASGKSCYLRQVGLIQLLAQTGSFVPAKSAKISICDRIFTRVGAVDDLATGQSTFMVEMNETANILNHATDRSLVLLDEIGRGTATFDGLSIAWAVAEYLATVLQSRTIFATHYHELNELASILENVANYQVTVKELPHEIVFLHQVRPGGADKSYGIEAGRLAGLPASVIDRAMQVMGQIEKHSKIAIGLRQGIKKIKPVKSDNSPSLQQLDIFDDSK

SEQ ID NO: 4082 - DNA, 2547 bp, Vibrio parahaemolyticus
  CDS (1)..(2547): transl_table=11
gtgaaagctgaacaaaaacacactccgatgatgcagcaatatctcaagctaaaagctgagaacccagaaattttgctgttctaccgcatgggcgatttctacgaactcttctatgatgacgcgaaacgagcgtctcaactgcttgatatttcattaaccaagcgcggttcatcggccggagaacctattcctatggcgggagtgccattccatgccgtggaagggtatctcgcgaaactagttcagcttggtgagtcagtcgcaatctgtgaacaaattggggatcctgcaacgagcaagggtcctgttgagcgtaaagtagtacgcatcgtcacgccaggtacagtgactgacgaagcactgctgtctgagcgcatcgataacctgattgcggcgatttaccaccacaatggtaaattcggttacgcgacattggacgtgacttctggccgttttcaattaacggagccagaaaccgaagaagccatgatggcagaactacaacgcaccgcaccgcgtgagttgttgttccctgaagatttcgagccagtccacttgatgtcgaaccgtaacggtaaccgtcgtcgccctgtatgggagtttgaactagatactgccaaacaacagttgaaccagcagtttggcacccgtgatcttgtcggttttggtgttgagcacgcctctcttggtttgtgcgccgcaggttgtttgatccaatacgtaaaagacacacaacgcactgctctaccacatatccgctcactaacgtttgatcgccaagatcactctgtaattttagatgcagctacgcgtcgcaatctagaaatcacccaaaatttagctggcggcacggacaatacactcgccgcagttctcgaccattgctcaaccccgatgggcagccggatgttaaaacgttggctgcatcaaccgatgcgttgtattgatacgctaaacaaccgcctggatgcgattggtgaaattaaagatcaaggcttatttaccgatcttcagccaactttaaaacagattggcgatattgaacgtatcttagcgcgtcttgctctacgttctgctcgtccacgtgatatggctcgcctacgccatgccatgcaacaacttcctgaactagaatcgctcactgcatccttaactcatccatacctagtgaagttggctcaatttgctgcgccaatagatgaggtatgtgagcttcttgaacgtgctatcaaagaaaacccgccggtagtgatccgcgatggtggtgtgattgcagaaggctataacgaagaattggatgagtggcgcaagctcgctgatggtgcaaccgagtatctagaaaagctcgaagcggatgaacgcgagcgtcatggcatcgatacgctgaaagttggctacaacgccgtacatgggttcttcattcaggtaagccgtggccaaagccatttggtaccgccacattacgtgcgtcgccaaactctgaaaaatgccgagcgctacattattcctgagcttaaagagcatgaagacaaagttctgaactcaaaatcaaaagcactcgcactagagaaaaaactgtgggaagagctgttcgatttgctgatgcctcatcttgaacaaatgcaaaacctagcttctgccgtttcacagatggacgtgttacaaaacctagcagaacgcgcagactcattggattattgccgccctactctagttaaagacgcaggtattcacattcaagcaggtcgccacccggtagtagagcaagtcacctcggacccgttcattgctaacccaatagaattaagcccaagccgtaaaatgctcatcatcacgggtccaaacatggggggtaaatcaacctacatgcgccaaactgcgctaattgcgttgatggctcacatcggctcttatgtacctgcagagtcagcacaaattggctcattggatcgcatctttactcgtatcggtgcttcagatgacttggcatcaggtcgttcaaccttcatggtagagatgacagaaacggccaacattctccacaacgcaaccaagaacagcttggtgttaatggatgagatcggtcgaggtaccagtacttacgatggtctttcattggcatgggcaagtgccgaatggcttgcaacacaaattggcgcgatgacacttttcgctacgcactattttgaactaaccgaattaccgaacttgctaccaaacttagcgaatgttcacctagatgcggtagaacatggcgacagcattgctttcatgcacgctgttcaagaaggcgccgcaagcaaatcatacggcttggcggttgcgggcttagctggcgtacctaaaacggtcatcaaaaatgctcgtactaaactgtctcaactagagcaactcggccaagctagcgactcgcctcgtccaagcactgtggatgtggcaaatcagctcagcttaatccctgaacctagcgaaattgaacaagcgttatcaaacatcgatccagacgacttaacacctcgtcaagcccttgaagagctgtatcgttga

SEQ ID NO: 4083 - protein, 848 aa, Vibrio parahaemolyticus
MKAEQKHTPMMQQYLKLKAENPEILLFYRMGDFYELFYDDAKRASQLLDISLTKRGSSAGEPIPMAGVPFHAVEGYLAKLVQLGESVAICEQIGDPATSKGPVERKVVRIVTPGTVTDEALLSERIDNLIAAIYHHNGKFGYATLDVTSGRFQLTEPETEEAMMAELQRTAPRELLFPEDFEPVHLMSNRNGNRRRPVWEFELDTAKQQLNQQFGTRDLVGFGVEHASLGLCAAGCLIQYVKDTQRTALPHIRSLTFDRQDHSVILDAATRRNLEITQNLAGGTDNTLAAVLDHCSTPMGSRMLKRWLHQPMRCIDTLNNRLDAIGEIKDQGLFTDLQPTLKQIGDIERILARLALRSARPRDMARLRHAMQQLPELESLTASLTHPYLVKLAQFAAPIDEVCELLERAIKENPPVVIRDGGVIAEGYNEELDEWRKLADGATEYLEKLEADERERHGIDTLKVGYNAVHGFFIQVSRGQSHLVPPHYVRRQTLKNAERYIIPELKEHEDKVLNSKSKALALEKKLWEELFDLLMPHLEQMQNLASAVSQMDVLQNLAERADSLDYCRPTLVKDAGIHIQAGRHPVVEQVTSDPFIANPIELSPSRKMLIITGPNMGGKSTYMRQTALIALMAHIGSYVPAESAQIGSLDRIFTRIGASDDLASGRSTFMVEMTETANILHNATKNSLVLMDEIGRGTSTYDGLSLAWASAEWLATQIGAMTLFATHYFELTELPNLLPNLANVHLDAVEHGDSIAFMHAVQEGAASKSYGLAVAGLAGVPKTVIKNARTKLSQLEQLGQASDSPRPSTVDVANQLSLIPEPSEIEQALSNIDPDDLTPRQALEELYR

SEQ ID NO: 4084 - DNA, 2439 bp, Onchocerca volvulus endobacterium
  CDS (1)..(2439): transl_table=11
ttgttgttttataggctaggagatttttatgaattgttttttgatgatgctatcaaagctgcaaagctactaaatatagtacttactaaaagaggtaatttgtgtggacagaatataccaatgtgtggagtcccggcacataatagtgaatcttacctgcataaactaatagatttagggtttaaagtagcaatctgtgaccagttagagactgctaatgaagcaaaaagaaggggccataaatctatagtaaaacgtgacgtagtcagaattgtcactccaggtacaattatcgaagattcattattggaagataaaagcaatagttaccttgcgtctatagttgaagaaaatgaagagtatgctattggttggcttgaattatcaacaggaaagtttttttacactataacgaatttgaaagctttagataatgacttgctacgtgtatcaccaaaggaattattaatttctgaaaagctcattgaagataagaaaatcaggtcaattttaaaaagctataaaatatcaattacacaacatgctcagagtttttttgagtataataaatcctatagaacgttgtgcgaattttataagattagagaacttggggtcataggaaattttagcaaagtggaggttatagcctgcggtgtgctgcttgaatatgtgagagtaactcaaaaaggttgtattccaaggcttgaactgccaaaaccatacaagcaacaaagttttatgctcatcgatgcttcagcaaggagaaatcttgaattattttcaactcaatttggtgaaagaaaaggttcactaatttcagttattgatcacacagttacagcttctggtggacgtttgcttaaacaaatgctcgcatcaccacttgcttgttctaaagcggttaatttaaggcttagcactgttgagttttttgtaaatcaccacaagttgcgtaaaaaggtgcgagaaatactttctagtattccagatattgagaggtcgttgtcgcgtttggtgatagggcgtggttcaccaaaagatattaatttattgaaagtgggtcttggaaaaacgttagagttgtctgagttcttatgtaaaattgaatccggcaagaatgaatttctcttgcgacgatatattatcccagtgtcaaacgctgagattaagacacagatttcagcatcaagctctagaatgacagtaaaaccaggtgaagatgaactgagtgcaatacataaaagccttggcaatcataaagaattatttgagcttctaaacgatgctgtgcttgataatgacttaaattcgataaaagaaggtgggtttattaatccacagtataatcgagaattatcagagttatcctatgtgctcaataatgttaataaactgataactaagcttcgtaaatcttattgcgatctgactggtattgcctcactaaaaatagtgcacaataatatacttggttattatgtcgaagtgtcaacgagtcataagttaacttcgaatatatttattcataggcagagtttagcgaatagcatacgctatactactagtgaattgaaggaattggaaaataaaatttttgcagcgcgtgacgctataattaacttggaaataaaaatttttggtgaactatgcagtaaaatcgctaaagaatctgagaagattgctcttgccgcaaatgctttagctaaactggatgttaggacttcatttgcagagatcgcagtacaaaataattacgtaaagcccattattgacgatagtaaagaattcaacatctataatggaagacatccagtagttgaaattgatggtaaatttattgcaaatagtattaatttggttggtatgcatctaatcactggtcccaatatggctgggaaaagtactttcttgaggcaaaatgctctcattgcaattctagctcatatgggttcatttgtaccagcagatagtgcgcacattggagtagttgacaagatattcagcagagttggtgcgacagataatgtaacggctggctattccacctttatgatagagatgcttgaaacagcaactatagtcaatcaggcaacagaacgttccttagtgatacttgatgaaattggcagaggtacaggagtatatgatggattatctatcgctcaggcggtgattgaacatattcatgatgtaaataagtgccgcgctatttttgcaactcattatcatgaactaactaaagtaggtaaatatttaaaaaatataaaatgtttctgtgtaaaagtaaaagaatggaacggaaaagtcgtctttttacatgaagtagttgagggtattgcagatgagtcatatggaatatatgtagcaagacttgctggttttcctgattctgtgctggacagagcaagtgcagtatttaaggagctaaaggcctga

SEQ ID NO: 4085 - protein, 812 aa, Onchocerca volvulus endobacterium
MLFYRLGDFYELFFDDAIKAAKLLNIVLTKRGNLCGQNIPMCGVPAHNSESYLHKLIDLGFKVAICDQLETANEAKRRGHKSIVKRDVVRIVTPGTIIEDSLLEDKSNSYLASIVEENEEYAIGWLELSTGKFFYTITNLKALDNDLLRVSPKELLISEKLIEDKKIRSILKSYKISITQHAQSFFEYNKSYRTLCEFYKIRELGVIGNFSKVEVIACGVLLEYVRVTQKGCIPRLELPKPYKQQSFMLIDASARRNLELFSTQFGERKGSLISVIDHTVTASGGRLLKQMLASPLACSKAVNLRLSTVEFFVNHHKLRKKVREILSSIPDIERSLSRLVIGRGSPKDINLLKVGLGKTLELSEFLCKIESGKNEFLLRRYIIPVSNAEIKTQISASSSRMTVKPGEDELSAIHKSLGNHKELFELLNDAVLDNDLNSIKEGGFINPQYNRELSELSYVLNNVNKLITKLRKSYCDLTGIASLKIVHNNILGYYVEVSTSHKLTSNIFIHRQSLANSIRYTTSELKELENKIFAARDAIINLEIKIFGELCSKIAKESEKIALAANALAKLDVRTSFAEIAVQNNYVKPIIDDSKEFNIYNGRHPVVEIDGKFIANSINLVGMHLITGPNMAGKSTFLRQNALIAILAHMGSFVPADSAHIGVVDKIFSRVGATDNVTAGYSTFMIEMLETATIVNQATERSLVILDEIGRGTGVYDGLSIAQAVIEHIHDVNKCRAIFATHYHELTKVGKYLKNIKCFCVKVKEWNGKVVFLHEVVEGIADESYGIYVARLAGFPDSVLDRASAVFKELKA

SEQ ID NO: 4086 - DNA, 2586 bp, Haemophilus influenzae
  CDS (1)..(2586): transl_table=11
atgatttccgaagaaaatttccaacagcacacgccaatgatgcaacaatatctaaaactcaaagcggagaatccagatattttgttgttttatcgcatgggggatttttacgagttgttttatgacgatgcgaaaaaagcggcggcattgttggatatttctttaacgaaacgagggcaatctgcaggacagcccattccaatggcaggaatgccttatcacgcggtggaaggttatttagcaaaattagtgcagttaggcgaatctgtggcgatttgtgaacaaattggcgatcctgctacaagcaaagggcctgtggaacgtcaaattgtgcgaattgttacgcccggtacggtcagtgatgaagcactgttgcctgaacgccaagacaatctgattgctgcggtatatcaagaaaaagaaaaatttggattagccactttagatatgacttctgggcgttttcagctttgtgaacctgcagataaagaaacattgcgtgcggaattgcaacgtattgcacctgtggaattgctgtattgtgaagaatttaacgaaatggctgcgattgaacattgcaaaggattacgccgtcgcccgatttgggaatttgaacttagcactgccattacgttattaaatcgtcaatttggcacaaaagatttacgcgcctttggtgtagaaaaatcccctctcggcttaagtgcggcaggttgtttattgcaatatgcaaaagaaacccaacgtactgcattaccccatattcaaagcattagcttaattcaaaaccaagactgcattcagttagatgccgccacgcgcagaaatcttgaattaacacaaaatctttcgggtggcacagaaaatacgttagcctctgtcttggataaatgcgttacgccaatgggcagtcgtttgctgaaacgttggattcatcagcctattcgtgatgtggaaaaattaaaacaacgccaacaatcgattgcggaaattctgaattttgatttggtcgatgaactccaaccttatttgcaattagttggcgatatggaacgtattttagcgcgtgtggctctgcgttctgctcgccctcgtgatctaactcgcttgcgtacggcattagaacaaattcctgcattacgcacgattgtgcaacaaaaaacatcgccatttttaaccgcacttttcagccaaattaccgatttcagtgagcaatgtgatttattgcaacgtgcattgattgaaacgcctccgcttttaattcgggatggtggcgtgattgctgaaggctataataccgaattagacgaatggcgtatgctgtctgatggtgcaacgcaatatttggaaaacctagaaaaacgtgagcgtgaaagcacgggcattgacaccttaaaaatcggttttaatgcagtgcatggttattacattcaaattagccaaggccaagcgcataaagcacccattcattatgttcgtcgccaaaccctgaaaaatgcagagcgttacattattcctgagctcaaagaatatgaagacaaagtgctgaaatcgaaaggtgcggcgttagcattagaaaagcaactttacgatgaattatttgatttattattaccgcacttaggcacgttacagctggctagccttgcactttctgaattggatgtattggtcaatcttgccgagcgcgcagataccctcaattacgttatgccaacattctgtgatgaagtgaatgtgaaaattgaaaatggtcgccatcctgtcgtggaacaagtattgaaagatcctttcatcgccaacccagtggagctcaatcacaaccgtcatttgttagttattcccgggccaaatatgggcggtaaaagtacttatatgcgccaaaccgcattaattacattgctggcgtatatcggcagctttgtgccagcagacagtgcgcgaattgggccgattgatcgtatttttactcgaattggtgcgtctgatgatttagcctcggggcgttcaacctttatggtggaaatgaccgaaatggcaaatattcttcatcaagctactgagcaaagtctcgtgcttattgatgaaattggtcgtggcacatccacttatgatggcttatccttagcttgggcttgtgcagaatggttagccaaaaaaatccgctcgcttacattatttgccacccattattttgaattaaccgcattgccagaacagctcgaaggcatagccaatattcatttagatgcccttgagcataacaacaccatcgcctttatgcacgccgtacaagatggcgcagcaagtaaaagttatggtttggcagttgcggctttggcaggcgtgccacaatccgtcattaaactggcaaaacagaaattgacgcaattagaaaaaaactcaagctattcagccgaacagcaaattcaagcgttgcgtgaagccaatcacaatcagggcgaattattctttgaacaagaaacggatgcactaagagaggctattgaaaagctggatcccgatgatttaagccctaaacaagccttggcgtatttgtatcagttaaagaaaatggtggggtaa

SEQ ID NO: 4087 - protein, 861 aa, Haemophilus influenzae
MISEENFQQHTPMMQQYLKLKAENPDILLFYRMGDFYELFYDDAKKAAALLDISLTKRGQSAGQPIPMAGMPYHAVEGYLAKLVQLGESVAICEQIGDPATSKGPVERQIVRIVTPGTVSDEALLPERQDNLIAAVYQEKEKFGLATLDMTSGRFQLCEPADKETLRAELQRIAPVELLYCEEFNEMAAIEHCKGLRRRPIWEFELSTAITLLNRQFGTKDLRAFGVEKSPLGLSAAGCLLQYAKETQRTALPHIQSISLIQNQDCIQLDAATRRNLELTQNLSGGTENTLASVLDKCVTPMGSRLLKRWIHQPIRDVEKLKQRQQSIAEILNFDLVDELQPYLQLVGDMERILARVALRSARPRDLTRLRTALEQIPALRTIVQQKTSPFLTALFSQITDFSEQCDLLQRALIETPPLLIRDGGVIAEGYNTELDEWRMLSDGATQYLENLEKRERESTGIDTLKIGFNAVHGYYIQISQGQAHKAPIHYVRRQTLKNAERYIIPELKEYEDKVLKSKGAALALEKQLYDELFDLLLPHLGTLQLASLALSELDVLVNLAERADTLNYVMPTFCDEVNVKIENGRHPVVEQVLKDPFIANPVELNHNRHLLVIPGPNMGGKSTYMRQTALITLLAYIGSFVPADSARIGPIDRIFTRIGASDDLASGRSTFMVEMTEMANILHQATEQSLVLIDEIGRGTSTYDGLSLAWACAEWLAKKIRSLTLFATHYFELTALPEQLEGIANIHLDALEHNNTIAFMHAVQDGAASKSYGLAVAALAGVPQSVIKLAKQKLTQLEKNSSYSAEQQIQALREANHNQGELFFEQETDALREAIEKLDPDDLSPKQALAYLYQLKKMVG

SEQ ID NO: 4088 - DNA, 2826 bp, Schizosaccharomyces pombe
  CDS (1)..(2826)
atgccgacatggaggtatattttttcattaagaagtaaatcttctttcactaaaacctgggtaccgtttactcaaattcgaaattctagtaaatcccccaaagtcggccaaaagccaattttacaaggcgcgttaggacctccgttagattttattagaccgaaggaaaaagtaactctacctcctcttttgaaagaagttagttttcagcaaaaaaagtttgccgactgtgttttgcttacaaaggttggtaatttctatgaaatgtacttcgaacaagctgagaaaataggtccattgctgaatttaagggtttccaagaaaaagacttctaaatctgatgtatcaatggcgggatttcctttttttaagctggaccgttatctcaaaatattggtggaagatttaaaaaagtgcgttgctctgagtgaggaagttattaggccagttgatgacctgagctcaaagaatatgtatattagatctgtcacccgagtcataactccaggaactctaattgacgaaaattttatgaatccttatgaaagcaactatatcctaactgtcgtcttcgatcccaatttttttagttccgatatttctaatcaaggaactgctgaagataaggattgtttcgctgattgtaaaattggattatcatggctcgacttgtcaactggtgagttcttcacacaagattccaacttgcagcgtttagcaggggatttgactagaatttctcctagagaaattgttttagacgaaagtttgaaaagttttactactcatcctatttattcctttattcaagaaagaaagtatttcctatcctacgtcgaaaatcgataccaatctctggattgttggaataagtttttagaaaaggaaattgacccttcctttataaaatattgtacaaaattggaggttacagctggctgtacattaatatcatatatcgctgatcggcttcaaaattcgcatccaaatattcaaccacccattcgagtttcgttaaacgaatacatgattattggagagtcagcaatgaaaggtcttgaaatcagatcatccttataccagaaccgctacacgggttcccttcttcatgccattaataaaacggttactaaatctggatcccgcctattaacccggagactttgtgcaccttctactaacattgttgaaataaacaataggttggacttagttgaaaaatttaagttgcttccggagttgtgttcgaaggtaataaacttgttgaagaaatcgaatgatacgcatcggattcttcaacatttattgatgggtaggggtaactcttatgatttattaaaaatggctgataatttctctattactaaggaaattcattctttactatctccccttgaatcttcatctgcttttaggttacttttattaaatatgcatccgcatgatgagctgaaacaactaataaataatgccgtggatgaaaatgctttgatgaagcagaaaataaacgaagaagaagaaaccgaagtaattgctcaagaagctgaagaaatacttcaagatgaaaatgctcaagtagagattgtaaagaaatcactatcttctgaatttgatattagacaaagtttcaaggaaaattgggttgtcaaatccaattttaataataatcttcgaaaactgcatgagaagcttcaaagtttgtttgcttcttacgataaacttcaagaggatttgagtaaacgcttagggaagaaagccactttacgaaaaagtcctgcaaagctttattatgtacatttaaaattgtcaggcaacgaaaccattgagcgatttatcaaaaaatttactcaagcagttctctttcaatcaacaaagagtacggcaagctttcaactaccgggctggacttcgcttggaatggatcttgagaatactaaattgcatatacatcaagaggagcagagagtcttgaaaagtatcactgatgagatagttagccatcacaaaacattgcgttcattagctaatgccctggatgaattagatatttctacttctttagcgactttagcacaggaacaggattttgtccgtccagtggttgatgattcacatgctcatactgtaatacagggacgacatccgattgtggaaaagggattgagtcataaacttattccctttactccaaatgactgttttgttggaaatgggaacgttaatatttggttgattactgggccaaacatggccggaaaaagtacatttttgagacaaaacgcaattatttctattctagcgcaaattggaagctttgttccagctagtaatgccagaatagggattgttgaccaaatttttagcagaataggatctgcggataatttgtatcagcaaaaatctactttcatggttgaaatgatggagacttcttttattttaaaaaatgctacaagaaggtctttcgtaatcatggatgaaattggacgtggcaccacagcaagcgatggtattgcaattgcttacggttgtctaaaatatctttctacaattaaccattctagaactctatttgcaacccacgctcatcaacttactaacttgacgaaatcttttaaaaatgtagagtgttattgcactaatttaagcattgacagagatgatcacactttcagtttcgattacaaactaaaaaaaggcgttaactatcaatcacacgggctcaaagtcgctgaaatggcaggtattccaaaaaatgtcctactggcagcggaagaagtgcttacattgcttcctaatacctctaaaccgacttccatgaaataa

SEQ ID NO: 4089 - protein, 941 aa, Schizosaccharomyces pombe
MPTWRYIFSLRSKSSFTKTWVPFTQIRNSSKSPKVGQKPILQGALGPPLDFIRPKEKVTLPPLLKEVSFQQKKFADCVLLTKVGNFYEMYFEQAEKIGPLLNLRVSKKKTSKSDVSMAGFPFFKLDRYLKILVEDLKKCVALSEEVIRPVDDLSSKNMYIRSVTRVITPGTLIDENFMNPYESNYILTVVFDPNFFSSDISNQGTAEDKDCFADCKIGLSWLDLSTGEFFTQDSNLQRLAGDLTRISPREIVLDESLKSFTTHPIYSFIQERKYFLSYVENRYQSLDCWNKFLEKEIDPSFIKYCTKLEVTAGCTLISYIADRLQNSHPNIQPPIRVSLNEYMIIGESAMKGLEIRSSLYQNRYTGSLLHAINKTVTKSGSRLLTRRLCAPSTNIVEINNRLDLVEKFKLLPELCSKVINLLKKSNDTHRILQHLLMGRGNSYDLLKMADNFSITKEIHSLLSPLESSSAFRLLLLNMHPHDELKQLINNAVDENALMKQKINEEEETEVIAQEAEEILQDENAQVEIVKKSLSSEFDIRQSFKENWVVKSNFNNNLRKLHEKLQSLFASYDKLQEDLSKRLGKKATLRKSPAKLYYVHLKLSGNETIERFIKKFTQAVLFQSTKSTASFQLPGWTSLGMDLENTKLHIHQEEQRVLKSITDEIVSHHKTLRSLANALDELDISTSLATLAQEQDFVRPVVDDSHAHTVIQGRHPIVEKGLSHKLIPFTPNDCFVGNGNVNIWLITGPNMAGKSTFLRQNAIISILAQIGSFVPASNARIGIVDQIFSRIGSADNLYQQKSTFMVEMMETSFILKNATRRSFVIMDEIGRGTTASDGIAIAYGCLKYLSTINHSRTLFATHAHQLTNLTKSFKNVECYCTNLSIDRDDHTFSFDYKLKKGVNYQSHGLKVAEMAGIPKNVLLAAEEVLTLLPNTSKPTSMK

SEQ ID NO: 4090 - DNA, 3087 bp, Debaryomyces hansenii
  CDS (1)..(3087): transl_table=12
atggcaccagagacgaagggtcaacgttcaatcagtcacttctttaaaagtcaaagctcaagtcaaaagcttaacaaggatgataccgaatattctggtaatataatcgacttaactaatggcgatgagaaagtttcatctaggttggcaaacttcgaacataaaccaaacaaaagtagcaaatcacccaatgaattagatacaagcaagagaaagagctccaaagataacgagcatgttgatggagatccagaaccagttaaaaagaaaccaagaactagtcagtcgctttctagatctaagtcaaaaccacaatcagttggatcaaatagtaagaaattgactccattggaaaaacaattcgttgaaatgaaacaatcaaatttagacaagatccttgcaattcaagttgggtataaatttaagttctttggagaagatgcggtgatagcttcgaagattctaagcatcatgctaatcccaggaaatatcaagttggacgaatatcaacacgatagatttgcttattgctctatacccgacaatagactacacatacatttaaagaggttgttaaaccaaggattaaaggtaggtgttgcaaagcaaacagaaaccgcagccattaaatcgatagatagcactaataagagtggcttatttgaaagagaaatcaccggggtttatactaaggctacgtatatgggtgatgagttgttgacgggggatcctaacattaatcgaacgagcatcacagatgatgaaatgggtgattatatattttgcattgacgagctgcattcaaaagacattggaatgattgcaatccaaccaattacgggggatataatttatgatacatttaatgataatgttacaagggatgaactagaaacgagactagtatacttaaaccccagtgagatactcgttattaacaatagcaccgaaatctctaaagaaacgataaagatgattaacatagtgaataataaagtcaacattattcatagaccaagaagacagcaaactgactataccaatgagatttataatttttttaatacaatcgacgagggtaaatataaagaccttggagaacattatttgttaaaatttccaaataatatccaatcgtgtatgattgaactcataaaatacttagaggaatttaaattaagtaacatatttacaataattagcaatgtcagctgcttttcaaattctaaaacttgcttggtattaccaagtagtacagtacaggcattggaaatatttcaaaacatgacggatccaaattcaaataagggttcattaatttggttactaaaccacacgcgtacaagaatgggtaatagattactagtgaaatggatatctaaaccattaatagataaggcgcaaatagaagaaaggctacaagggatagaagatttaaccttcaaattcaaccactttatagattccttgaaaaaccaactagataagattggtaaggcaagtattgatttagaaaaaaacttaattaaagttcattattcatctacttatcaacttgataagattagcaggaaggaggtctatttattactaaaatgctttgacgatattttatcaatgattaaacagtttggaaaaccaacaaataatatcttggaatccatccattctcctttattattaagaatattcgatgaattgatgcaacttgcgaaagaggatacagtgagatgtttgcttgatatgatttcagcagatgccttggacgattcgaatttaaatgaccaaaaaataaagtttttcaatttaaattattttaaggaccaacagataatcagtcagttgagtgaaatactgaatgttgagtcgttattaaatgatgagttaattgaaattcgaaaaatgttgaagcgacctcaactaaattatattacaagctccaaagagacatatttggttgaagttagaaatggaaaaatggttgactctttaccgaaagattggattaaaataaatggaactaagacagtatcaagatttagatcaccggaaatcaccagattacacaagcagttgcaataccataatgacatgttaatcagaaattgtgataaagcatttaatgcctacttatttaagatagataataactacgagttttttagtaagattatcagaaacctatcaacctttgattgtttgttatcattgagcgccgtgagctcgatcaattccaattatgctaggccaaaaatagttgaggacaagcaaattatccaaatgaagaacagtcgtaacccaataattgagaatgtatctgttaattactcaaattacatatcaaatgatatcaatatatcatacgacgaagacagggttttgattataactggcccaaatatgggaggtaaatctacgtatgttaaacaggttgcattattagtgattatggcccaaatcggtagttacataccttgcgacgaagccaccgtaggtatctttgattcaatatttattagaatgggtgctagagataatattctacaaaaccaatcaacttttatgattgagatgttagaatgtagtcatatacttaaaaatatgacttcgaattcactaataatactcgatgaaataggaaggggtaccggtacgaacgatgggattgcaattgcatactctatattgaactacttaattgaagaaccgagaaaacctttaactctattcattacccatttcccatctttgcatgttttggaggataaatttaaaggtattgctactaactaccatatgggattccacgaagtctcaaaatccaatcaagaattcccggaggttgtatttttatacaacttagttcgaggtgtagttgggaatctgtacggtcttaatgttgctaagctcgctggtatacctaattcaattatcaataatgcatatactaagtcaaccgaaataagagatgcaatcgaatcagattggcccaagaaacttatcaaaatgatcaaactgttaagagagcaaaatgatgctagggttgagttattagaaatagaacaactatgtaataatatagactaa

SEQ ID NO: 4091 - protein, 1028 aa, Debaryomyces hansenii
MAPETKGQRSISHFFKSQSSSQKLNKDDTEYSGNIIDLTNGDEKVSSRLANFEHKPNKSSKSPNELDTSKRKSSKDNEHVDGDPEPVKKKPRTSQSLSRSKSKPQSVGSNSKKLTPLEKQFVEMKQSNLDKILAIQVGYKFKFFGEDAVIASKILSIMLIPGNIKLDEYQHDRFAYCSIPDNRLHIHLKRLLNQGLKVGVAKQTETAAIKSIDSTNKSGLFEREITGVYTKATYMGDELLTGDPNINRTSITDDEMGDYIFCIDELHSKDIGMIAIQPITGDIIYDTFNDNVTRDELETRLVYLNPSEILVINNSTEISKETIKMINIVNNKVNIIHRPRRQQTDYTNEIYNFFNTIDEGKYKDLGEHYLLKFPNNIQSCMIELIKYLEEFKLSNIFTIISNVSCFSNSKTCLVLPSSTVQALEIFQNMTDPNSNKGSLIWLLNHTRTRMGNRLLVKWISKPLIDKAQIEERLQGIEDLTFKFNHFIDSLKNQLDKIGKASIDLEKNLIKVHYSSTYQLDKISRKEVYLLLKCFDDILSMIKQFGKPTNNILESIHSPLLLRIFDELMQLAKEDTVRCLLDMISADALDDSNLNDQKIKFFNLNYFKDQQIISQLSEILNVESLLNDELIEIRKMLKRPQLNYITSSKETYLVEVRNGKMVDSLPKDWIKINGTKTVSRFRSPEITRLHKQLQYHNDMLIRNCDKAFNAYLFKIDNNYEFFSKIIRNLSTFDCLLSLSAVSSINSNYARPKIVEDKQIIQMKNSRNPIIENVSVNYSNYISNDINISYDEDRVLIITGPNMGGKSTYVKQVALLVIMAQIGSYIPCDEATVGIFDSIFIRMGARDNILQNQSTFMIEMLECSHILKNMTSNSLIILDEIGRGTGTNDGIAIAYSILNYLIEEPRKPLTLFITHFPSLHVLEDKFKGIATNYHMGFHEVSKSNQEFPEVVFLYNLVRGVVGNLYGLNVAKLAGIPNSIINNAYTKSTEIRDAIESDWPKKLIKMIKLLREQNDARVELLEIEQLCNNID

SEQ ID NO: 4092 - DNA, 3090 bp, Kluyveromyces lactis
  CDS (1)..(3090)
atgtaccagccaacgatcagtcacttttttaaatcatcccaaccatcgtctcaaacagacacgcgacaagatgaggatcagcgacttgacattgaatctcacgagcagcgaggtggagcaaatatgaacaaagacgagctgataaatattcttggctcagattcagaatcggatcaagatttggatgaagatttggatcaagatcaaaataataatcaagatcaagatcaagagcaagatcgagatctagcttcaaaggccaataatggtaggagcacactctcagcagaacgaattgagagacggccagattttaacgagaaattgaagacgattatgaggaaacggaatgctggatccatgataaacactggatctgacgacgagaatgacgataatgatgatgttaagtcaactaaaagaactaaggcgaataacaaaaaacttacggaacttgaccagcaatttaaagagttgaaacttaagcacatggatacgatattatgtgttagagtgggttataaatacaagttctttgctaaggatgcagaaatcgtgagtaatattctgcagattaagttagtgcctggtaaaaaaacgctagacgagtcagatccaaatgacagaaactatcgaaagttccaatattgctccatccctgatacaaggttgcacgtacatttacaaaggcttgtatttttcaattacaaagttgctgtagtggaacaaactgagactagtgccttgaagaagaataataacagtggatctttgttcaccagagagattaaaaacatattcaccaaagtttcgtacggaataaatgagacttttgacaaaagtgaagatcgcattctaggtgatctgacctctgtatgggcaatctctattaatgaaacttctaaaatgaggaaagtgaacctcatttcagtgcaattgaattctggtgaaattgtacacgatcaattttcagacgacattcttttaaacgtgaatttggaagcgagaatacgttatttaaatcctacagagatcataactgaagaggaactaccaccatcgattcgaacgatttttacaaaactaaatcaggatatacagttttatcaatctcataaggaagcttgtcctaacttgttcgatgcattacaaggtttagatttgaataatgaacttaaaagattgctttctgtgttgcactcatatttatcaacttttgaaaatacaaaggtgctatattttgcttcgaattattcatcatttaccgctaaaaacttcatggttttgccccgaaacaccatcgaaagtttggaaatctttgaaaattcgaccactaacaaaaccaatggttctctattgtgggttatggatcatacgagaactcaatttggttatagacttttacgaaaatggatatctaaaccactgatagatttaaaatcgatccttgacaggcaagatgctatcacttgcattatgaaagaagttcacagcatttttttcgaatccttcaacgaactactgagaaaaagcatagaccttgaacgcgcactcaatagaatagcttatggtagtacatcaagaaaagaagtttatttcttcctaaaacagattgcaactttcgcatctcttttcaaatcacatcacactttcattcatgaccaactgcataaagagaattcagcattgcgcaaaacctcctgtctattgttcaatattttgcaaaacttagatgcattttttagtgctactgatcttcctctttttctacaaatgatcaacgtcgatgctgctttggataaagattcccataaaaacgtcatcgaattctttaatttgaataagtatgatttcccggaaggtcttttgcacaagtatagagacattgaggaagtgaaaacagagttagatgacgaacttcaaaacatcaaaagggtcttgaaaaggcctactttgagctacaaggatactaaagactacctaattgaagtcagaaatactcaggcaaagacagtgccttcgaattgggtaaaggttaattcaactaaagcggtgagtaggttcaggacgccaaaaacggaagaattagttggtaaacttctgtatcataatgaccttttgaatctactagccgaagatgagtttaagcgattccttcaaaggattgttgatcggtacgctgaaataaaaacatgtatcaataatttagccacgtatgactgtattctttctttggctgcaacatcgtcaaatgtcaattacgtgaaaccaaagttgactgaactgcatcaaaaagtaaaagtgaagaatggaagaaatccaatcatagagtctcttgatgttaattatgttccgaatgacgtgctaatgtcctcgaacagcggtaaaataaacatcataacaggcccaaatatggggggtaaatcctcttatattagacaagtagcattgctggtaataatgacacaaattggctgttacatccctgcagattctgctgaaatgtcgatatgtgatcggatattcaccagaattggttcacacgatgatttactgaatgctaaatcaacttttcaggtggagatgtctgaggtcttacatattctaaactcatcgacgccaagatctctgctattgctagacgaagttggaagaggaacaggtacgcatgatgggttaagtatatcttttgccattttgaactattttgtttacctggctgacaattgtcccttggtgttgtttattactcactactctgctttgtgccaaatcgactctaaattaatagcaaactaccatatgagttacatagagaaacaccaaccaggtgaaaaatggaccaacgttattttcctctacaagttggtactgggtcaggctcataattcttacggttttaatgtagcgaaactatcaaatattcccacggagattattaacagagcatttgaagtgtctgaggagaaaatcttatccagtaagcatcataatttccttgagatcatgaaggcactgaaaagagttaatgaaaggaaattaaataaagaagcgttgaaaaaaattcaagctttcattgaagatatataa

SEQ ID NO: 4093 - protein, 1029 aa, Kluyveromyces lactis
MYQPTISHFFKSSQPSSQTDTRQDEDQRLDIESHEQRGGANMNKDELINILGSDSESDQDLDEDLDQDQNNNQDQDQEQDRDLASKANNGRSTLSAERIERRPDFNEKLKTIMRKRNAGSMINTGSDDENDDNDDVKSTKRTKANNKKLTELDQQFKELKLKHMDTILCVRVGYKYKFFAKDAEIVSNILQIKLVPGKKTLDESDPNDRNYRKFQYCSIPDTRLHVHLQRLVFFNYKVAVVEQTETSALKKNNNSGSLFTREIKNIFTKVSYGINETFDKSEDRILGDLTSVWAISINETSKMRKVNLISVQLNSGEIVHDQFSDDILLNVNLEARIRYLNPTEIITEEELPPSIRTIFTKLNQDIQFYQSHKEACPNLFDALQGLDLNNELKRLLSVLHSYLSTFENTKVLYFASNYSSFTAKNFMVLPRNTIESLEIFENSTTNKTNGSLLWVMDHTRTQFGYRLLRKWISKPLIDLKSILDRQDAITCIMKEVHSIFFESFNELLRKSIDLERALNRIAYGSTSRKEVYFFLKQIATFASLFKSHHTFIHDQLHKENSALRKTSCLLFNILQNLDAFFSATDLPLFLQMINVDAALDKDSHKNVIEFFNLNKYDFPEGLLHKYRDIEEVKTELDDELQNIKRVLKRPTLSYKDTKDYLIEVRNTQAKTVPSNWVKVNSTKAVSRFRTPKTEELVGKLLYHNDLLNLLAEDEFKRFLQRIVDRYAEIKTCINNLATYDCILSLAATSSNVNYVKPKLTELHQKVKVKNGRNPIIESLDVNYVPNDVLMSSNSGKINIITGPNMGGKSSYIRQVALLVIMTQIGCYIPADSAEMSICDRIFTRIGSHDDLLNAKSTFQVEMSEVLHILNSSTPRSLLLLDEVGRGTGTHDGLSISFAILNYFVYLADNCPLVLFITHYSALCQIDSKLIANYHMSYIEKHQPGEKWTNVIFLYKLVLGQAHNSYGFNVAKLSNIPTEIINRAFEVSEEKILSSKHHNFLEIMKALKRVNERKLNKEALKKIQAFIEDI

SEQ ID NO: 4094 - DNA, 2982 bp, Schizosaccharomyces pombe
  CDS (1)..(2982)
atgagaggaatgagttataacattactcatgaatgcgacgctattaatattctatcagataatttacatgaaggagcaatatcagaagatatggttgccctcagtggtccagccatagagttactagaaaataatgttggtagttcaaaaaatagctatcaagaagatgagggaagttcttcgattgatgagaacgcgcctcttataagcataaaacgaaagaggagaattcgtacggttaaatctacttcaaataaagaattagtgcaaagaaaagcatcgaaacctactaaacagaaatctgttttcacaccacttgagcagcaatacttagaattgaagaaaaattatcaagaaactattttggcaattgaagtaggatataagttccgattttttgggaaggatgcaaaaatagcctctgaggtgttaggaattagttgctattttgagcacaattttttaaatgctagtgttccctcgtatcgtattgactatcacttggaaagactcattaattttggtctcaaagttgctgttgttcgacaaactgaaacagccgctctcaagtcaactagctctagcagaaacactctgtttgacagacgagttgctcgcgtgcttaccaaggggactactctagatgatagcttttttcgctttgagcaaacacagcatggtacactacaagcttcccaatttatcctatgtgttgcagataatgttgataagagcaaagcaaaatcaggaagagttcaggttggactaattgccatacaattatcatctggaactactgtttatgatcattttcaagatgattttttgagaagcgaattacaaacaagactttctcattttcaaccttgtgaattgatatattcgaacaagttatcttccgaatcggttgccctactgaatcattacgtatcaactgaaaaaacttgcggtagagtagtgcgtgtgcaacatgctgttcagcaggacgtgaaactagcattggagaatttgcaggacttcttttcttctaaatgcatcatgtccggtagcaaaattatagaattacacatggaaaaggtgaagtctttacattctctttcaatcatttgtttggacatggccatttcttatttgatggaattctcattggaagatctattcgttgcttcaaacttttatcaaccttttgatagcatttcttctatggttttaagtaaacaggctttggaaggtcttgagcttttcgttaatcaaacagatcatacacctgttggtagcctattttgggtgttagatcgcacatacacaagatttggacaaaggatgcttcagagatggcttcaaaagcctttggttgataaagaaaatataatcgagcgtctggacgcggttgaggaattagcctttaattctaatagtcaagttcaagcaattcgtaaaatgctgtatagattgcccgatctcgaaaagggtctgtccagaatctactatcaaaggggtttttataaagccgcatctgctttctcgaaaaattcatactcttgttttaagtcagcattgcttagaagactaattcaacagcttcctagcatatcgtctatcattgatcatttcttgggaatgtttgatcaaaaagaagctgaaaataacaacaaggttgacatgttcaaggatattgacaattttgatttatcagaagagccaaacgatgtagattatgagttggcacaggaaattcgagagctgaaaatgagtattttgatggtcagaactgaaatggattttcaccttcaagaattgagagactatttagaatatcctaatttggagttttctatttggggaaatgtcaaattctgcattgaagtttctaaaggatgtaaaaaaattccaccagattggatcaagttaagttctactcgatctcttttccggtttcatacaccaaaaattcaatctctcttgattgaattgtcttctcatgaagaaaacctaacaatttcaagtgaaaaaatttatcgctcatttctttctagaatatctgaacattacaatgaattgcgaaatgttacaacagtattggggacattggattgcttaatttcttttgcccggatttcttctcaatcgggttatacaaggccagaattttcagataaggagctgttaatacatgaatctcgacatccaatgattgaattgctaagtgataaatcttttgtacctaaccatattcatctaagttctgatggtgtcaggtgtttgttaattacgggcccaaatatgggcggaaaaagttcttttgttaaacaattagcacttagcgccattatggctcaaagtggttgctttgttccagcaaaaagtgctctgcttcctatttttgattcgattcttatcagaatgggatcatctgacaacctttctgtgaacatgtctacttttatggtagagatgctcgaaaccaaggaggttttaagcaaggctacagaaaaatcaatggtcattattgacgaattaggtcggggtactagtactattgatggagaagctatttcttatgcagtcttgcactatttaaatcaatatataaaatcttatttattgtttgtgacacattttcctagtttaggaatactagaaagaaggtttgaagggcaacttcgttgctttcacatgggttacttaaaatcaaaggaagactttgagactagcgtttcacagtctatatcatttctttacaaattggttcctggggttgcttcaaaaagttatgggttaaatgttgctagaatggcaggaattccgttttcaattttaagtcgtgcaaccgaaattagtgaaaattacgaaaagaagcatagaaatgcaaggaaaaatgttttcatacgaaaggttgcaaaactattaatgattcttaatgccgaagagattgattttaaaaggcttttctatgatcttaccgctttcgaagaaatctga

SEQ ID NO: 4095 - protein, 993 aa, Schizosaccharomyces pombe
MRGMSYNITHECDAINILSDNLHEGAISEDMVALSGPAIELLENNVGSSKNSYQEDEGSSSIDENAPLISIKRKRRIRTVKSTSNKELVQRKASKPTKQKSVFTPLEQQYLELKKNYQETILAIEVGYKFRFFGKDAKIASEVLGISCYFEHNFLNASVPSYRIDYHLERLINFGLKVAVVRQTETAALKSTSSSRNTLFDRRVARVLTKGTTLDDSFFRFEQTQHGTLQASQFILCVADNVDKSKAKSGRVQVGLIAIQLSSGTTVYDHFQDDFLRSELQTRLSHFQPCELIYSNKLSSESVALLNHYVSTEKTCGRVVRVQHAVQQDVKLALENLQDFFSSKCIMSGSKIIELHMEKVKSLHSLSIICLDMAISYLMEFSLEDLFVASNFYQPFDSISSMVLSKQALEGLELFVNQTDHTPVGSLFWVLDRTYTRFGQRMLQRWLQKPLVDKENIIERLDAVEELAFNSNSQVQAIRKMLYRLPDLEKGLSRIYYQRGFYKAASAFSKNSYSCFKSALLRRLIQQLPSISSIIDHFLGMFDQKEAENNNKVDMFKDIDNFDLSEEPNDVDYELAQEIRELKMSILMVRTEMDFHLQELRDYLEYPNLEFSIWGNVKFCIEVSKGCKKIPPDWIKLSSTRSLFRFHTPKIQSLLIELSSHEENLTISSEKIYRSFLSRISEHYNELRNVTTVLGTLDCLISFARISSQSGYTRPEFSDKELLIHESRHPMIELLSDKSFVPNHIHLSSDGVRCLLITGPNMGGKSSFVKQLALSAIMAQSGCFVPAKSALLPIFDSILIRMGSSDNLSVNMSTFMVEMLETKEVLSKATEKSMVIIDELGRGTSTIDGEAISYAVLHYLNQYIKSYLLFVTHFPSLGILERRFEGQLRCFHMGYLKSKEDFETSVSQSISFLYKLVPGVASKSYGLNVARMAGIPFSILSRATEISENYEKKHRNARKNVFIRKVAKLLMILNAEEIDFKRLFYDLTAFEEI

SEQ ID NO: 4096 - DNA, 2646 bp, Acinetobacter sp
  CDS (1)..(2646): transl_table=11
atgaatagcacagaaacaatggctgacctttcctcgtatacacctatgatgcagcaatattttaaggtaaagctggaacaccaacatgctttacttttttatcgcatgggtgatttctatgaactcttttttgatgatgcacgaaaagcggcaaaacttttaggcattacactcacgcatcgtggtaaagctaatggtgagcccattcctatggcaggtgttccctatcatgctgctgagggatatttggcacgcttagttagagcaggacaaactgttgctatctgtgaacaggtaggtgaaggcgagaacgcaggctctcgctgtaaagcccccatggaacgcaaagttgtacgcattattaccccaggtacgattacagatgacgcattgcttggcagttatcaatcttcaaatctggttgcactttgtattcagcaaaataaaatcgggattgcattactggatttgagtgccagtatatttaaagttcaacagcatgagtttaaaactgaacaactctacattgaacttgcccgcctcatgccaagtgaaattgtggttgatgaagatctggttgatcaaaacattttagagcaaatcaaaaaacaaattgaatgttctattaccaaacgtcctaatgttgacttcaatctaaacaatgcacaaaaaaccctgtgtgatcaattcggtgtaaccactttgtctggctttggaattgatcatttaccacttgcaaaagcggctgcggctgcattaattcattacgcaaaagaaactcaaaaaacagcattaccgcatattcgttcaattcaattggaacaaagcactgattttattgcacttgatccaattacccgccgtaatctggaaattattgatccactctttgagcatggaacttcactgttcaatttgattaatgattgtcaaacggcaatgggcggacgattactgagtcgcatacttatgcagccaatacgtgatactgctattttagacgcacgacttgatgcaactgaacaattattaattggctatcatgaatcaccagtgcgtttggtactcaaagaaattggagatatcgaacgggtattaagccgcgttgctttaggtactgcacgaccacgtgacttagtacaattacgtcaggcgtgtgctcagattccatttttaaggcatgcgctattacctgcaattcaaacaaaatcttcaaaacttctaaatgagctagatcatgagcttggggattttaaagatttgcatcaattgttattgtcagcaattgtagaaaacccacctgttctacttcgagatggaaatgtcattgcagaaggttatgatgccgaactagatgaactccgtaagatccgcgatcatgccggtcaatttcttgttgatcttgaaataaaggaacgtgagtcaagtggaatcccaactttaaaaattggctacaatcgtgtcagtggttattacatcgagttgacacgtgctcaggcagaacaagcacctgcatattatattcgtcgtcaaactttaaaaaatgcagaacgttatatcacgcctgaacttaaaagttttgaagataaagttctttcaagcgaatcacgtgcacttgcacgagaaaaactgttatttgaaagtctgcttgagacactgaaaaaaaatatcgccaacctacaaatgatgagttctgcaattgcccaaattgatgtattggccaactttgctcatcaggcgcgtttgcaaaattggaaccgtcctgattttagcccagaaattggtattaaaattcatgatggtcgtcatcctgttgttgaagcactgagtaaaaccccttacaccccaaatgatacctttttagatagtcagcatcgcatggctatcattactggccctaacatgggcggtaaatcgacattcatgcgtcagactgctttaatcagtttactggcctattgtggtagctatgttcctgcaaaatctgccaagcttggtccaattgaccgtatctttacacgtattggctcggcagatgatttatcgactggtaaatctacatttatggtcgaaatgacagaaacctctcaaattctacatcatgcgacccatcaatcattggttttaatggatgaagttgggcgtggaaccagcacttacgacggtttatcacttgcttgggcttgtgtactcgatttaaccaaacgaattaaatgcttatgcctctttgccacacattattttgagctaacagagttaggtagtgaatctgctatcgacaactatcatgttacggcaaaagaaatgaatggtaatcttattctgctgcataaagtccagcatggcccagcgagtcaaagtcatggattacaagttgcaaaattggcgggtatacctgcaagcgtgatcaaggaagcacaaaaacgtttaaaaattctggaaaagcaacaacagcaatattttcaaactgcggtacaaaacgatttgtttgctataccagaactccctcaaattgatgaaacgaaaattgagattaaaaagacctctcctgtgcttgatcatcttaaacaacttgacgttgatagtttaacgccgagacaagcacttgaagcactttatcaactcaaagatcaattggaacactaa

SEQ ID NO: 4097 - protein, 881 aa, Acinetobacter sp
MNSTETMADLSSYTPMMQQYFKVKLEHQHALLFYRMGDFYELFFDDARKAAKLLGITLTHRGKANGEPIPMAGVPYHAAEGYLARLVRAGQTVAICEQVGEGENAGSRCKAPMERKVVRIITPGTITDDALLGSYQSSNLVALCIQQNKIGIALLDLSASIFKVQQHEFKTEQLYIELARLMPSEIVVDEDLVDQNILEQIKKQIECSITKRPNVDFNLNNAQKTLCDQFGVTTLSGFGIDHLPLAKAAAAALIHYAKETQKTALPHIRSIQLEQSTDFIALDPITRRNLEIIDPLFEHGTSLFNLINDCQTAMGGRLLSRILMQPIRDTAILDARLDATEQLLIGYHESPVRLVLKEIGDIERVLSRVALGTARPRDLVQLRQACAQIPFLRHALLPAIQTKSSKLLNELDHELGDFKDLHQLLLSAIVENPPVLLRDGNVIAEGYDAELDELRKIRDHAGQFLVDLEIKERESSGIPTLKIGYNRVSGYYIELTRAQAEQAPAYYIRRQTLKNAERYITPELKSFEDKVLSSESRALAREKLLFESLLETLKKNIANLQMMSSAIAQIDVLANFAHQARLQNWNRPDFSPEIGIKIHDGRHPVVEALSKTPYTPNDTFLDSQHRMAIITGPNMGGKSTFMRQTALISLLAYCGSYVPAKSAKLGPIDRIFTRIGSADDLSTGKSTFMVEMTETSQILHHATHQSLVLMDEVGRGTSTYDGLSLAWACVLDLTKRIKCLCLFATHYFELTELGSESAIDNYHVTAKEMNGNLILLHKVQHGPASQSHGLQVAKLAGIPASVIKEAQKRLKILEKQQQQYFQTAVQNDLFAIPELPQIDETKIEIKKTSPVLDHLKQLDVDSLTPRQALEALYQLKDQLEH

SEQ ID NO: 4098 - DNA, 2463 bp, Anaplasma phagocytophilum
  CDS (1)..(2463): transl_table=11
gtgagtaataatactgagtatacgcctgttcttaggcaatatagagcgctaaaagagcaatacggtgagtgtttactactgtaccgtttaggggacttctacgagcttttttttgaagatgcagttatagcatcgaagactctaaacatagttctcaccaaaagaggcactgatactcctatgtgtggtgttccttatcatagcagtgagagttacatagggagattggtaaaatctggatacaaagttgcagtatgtgagcagattgaaactgccgaggaagcccgtaaaaggagcgttagagctttggtacgtagggaggttacccggatagtgactcctggtacactggtagaagatagcctattagatgctaaagagaataactatttggcatgtatttcaaatattggggagagatacggtgttgcatggatggagttatccaccggattgtttcacgtgcgtgcaagtaagttggaagacttagatagtgaaatacagcgtttgggtcccagtgagctattgatttcggacaagcttaaggagcagcaatctatggagcttgtgctgaagaggcatcgctgtgctattactagccataatgagagtttttttgactccaaaagagcggaaaaggttttgtgtggggtatacggagttactactgtacaaggattaggtgattttgaagaggtagaagtatcagcttgtggttctttgcttgagtacgttagaatgacgcaaagaggttctcttcccaagcttagctacccaaaggttcgagatagtaatagttttgttctgatagatggtcctgcactgaggaatcttgaactattttctacacagtctggcgagaagaaagggtctctgatttctactattgatcatactgttaccgctatgggtagccgtatgctgaagaggtatctcgcatttcctgtggcctgtcataatgttataaatggtcgccaagatgctgttgaattctttgtgagtaacaggtctctttgtgaggtgattaggggagttattaatggatttcccgatattgagcgcatattgactagggtaaagttttccaagtgttctccgaaagatatacatttgcttgggcgggcattaagcaagatttttgaattatcaaggataatcagcaggtctactcatgcgataatttccaagattttggtttcattgggtgatcatagagacttgctgaagctcattagtgaggtaatgcttgaaaacaatgcaaccattactaaggacggcggttttataaatccaggatgtaatgagcggctggcagagttagcacgtattcagaacgatagcggtgtattgatacagaggttgcgcgataagtatagagctctaacaggtattagtagcttgaaaattctgtctaacaatttgcttgggtactacatcgaggtatcttcttcgtataaagtaagtgacgagtcttttgttcgtaggcagagtctggctaacagcacgcgctataccactgcggaattgaaggagcttgaggaaaggatagtttcagcgcaaagcgaaagtgcagacttagaagcgcagatttttaaggggctgtgctcaaggattgctgatgagtgtcaggatatagggttagccgcagaggctgttgcagagttggatgttcttacgacgcttgctgaagttgcggtggaaaataattatgtaaggcctattgttgatgatagtaagcagtttaaaatagtacgaggtcgtcatccagtagtagaagtaggaacggattttattgcgaatgactgtgatctttcagaggggaacagtatgtctctcattaccgggccaaatatggcaggtaagagcacgtttttgaggcaaaatgctttaatagcagttttggctcatatagggtcatttgttcctgctgagcatgcgcatataggggtgatagataaaatatttagtagggtaggtgcatcggataacatagcgcttgggcactctacttttatggtggagatggtagagactgcagcgattttgaatcaagcaacttcgaagtcactggttattttagatgaaattggccgtggaaccgctattaatgatggcctttccatagctttagccgctattgaacacatacatgatgttacaaagagtagggcgatatgtgcaacgcactatcatgagctaccaaaacttagttcgcattttgaaaatatcaggtttttttgtcttagaattgaagagtggaagggtgaagtggtgttcttgcatgagcttataccgggcatttcgagtagatcttatggtatacatgttgcggggcttgcggggtttccgaagggtgctttagagagggcgaagtttttcatgagcaagtttgatgaggcagagcactatagaagcatagatagcattgatattacttctggacgacatataactgatgagtga

SEQ ID NO: 4099 - protein, 820 aa, Anaplasma phagocytophilum
MSNNTEYTPVLRQYRALKEQYGECLLLYRLGDFYELFFEDAVIASKTLNIVLTKRGTDTPMCGVPYHSSESYIGRLVKSGYKVAVCEQIETAEEARKRSVRALVRREVTRIVTPGTLVEDSLLDAKENNYLACISNIGERYGVAWMELSTGLFHVRASKLEDLDSEIQRLGPSELLISDKLKEQQSMELVLKRHRCAITSHNESFFDSKRAEKVLCGVYGVTTVQGLGDFEEVEVSACGSLLEYVRMTQRGSLPKLSYPKVRDSNSFVLIDGPALRNLELFSTQSGEKKGSLISTIDHTVTAMGSRMLKRYLAFPVACHNVINGRQDAVEFFVSNRSLCEVIRGVINGFPDIERILTRVKFSKCSPKDIHLLGRALSKIFELSRIISRSTHAIISKILVSLGDHRDLLKLISEVMLENNATITKDGGFINPGCNERLAELARIQNDSGVLIQRLRDKYRALTGISSLKILSNNLLGYYIEVSSSYKVSDESFVRRQSLANSTRYTTAELKELEERIVSAQSESADLEAQIFKGLCSRIADECQDIGLAAEAVAELDVLTTLAEVAVENNYVRPIVDDSKQFKIVRGRHPVVEVGTDFIANDCDLSEGNSMSLITGPNMAGKSTFLRQNALIAVLAHIGSFVPAEHAHIGVIDKIFSRVGASDNIALGHSTFMVEMVETAAILNQATSKSLVILDEIGRGTAINDGLSIALAAIEHIHDVTKSRAICATHYHELPKLSSHFENIRFFCLRIEEWKGEVVFLHELIPGISSRSYGIHVAGLAGFPKGALERAKFFMSKFDEAEHYRSIDSIDITSGRHITDE

SEQ ID NO: 4100 - DNA, 2565 bp, Anabaena variabilis
  CDS (1)..(2565): transl_table=11
atgaccgcttctgacattcagccgacggaaccccatactcccccaacccctcacgccgacactcgactggtagaccgcactaagctgagtaagatgtatcagcattatgttgaggtgaaagataagtatcctcatgcgttgttgttgtatcgggtgggtgatttctttgaaacgttttttcaagatgctgtcacggtagctagagaattagaattagtcctgacaagtaaacacggtggcgaagttggacgggtagccatgactggtgttcctcaccatgcttgggaacgctacactacccaattggtggaaaaaggttatgctgtggtgatttgcgaccaagtagaagatgcttccgaggctgtgggtttggtgcggcgggaggtgacgcgcatcctgactcccggcactttgctcgaagagggaatgctcaaatcaagtcgcaataattacttagcagctgtggtaattacgagcaatcattgggggctagcctatgcagacatctccaccggggaatttttgacaactcaagatagtgatttagaacggttgacccaggaattgatgcggttgcaaccttcagaagtattggttcccaccaacgccccagatttgggtacattgctgcgtccgggggaaacttcaccacaccttccagaatgtttaccaccatcattttgctatagcttgcgatcgcaacaaccattctcccaggccgaagctagaagtacattattgcagagatttaaagtgcgatcgctggaaggtttgggttgcgaccatctccccttggctgtgcgcgcggctggtgggttgttggaatatgtggaagatacccaaaaagctggacaagtatccctgcaaagactccgcacctataccattaccgattatctaattgttgataaccaaacccgccgcaatttggaaattactcaaacagttcgtgatggtacttttcacggttccttactatgggcattagataaaactagcacggcgatgggtagtcgggctttgcggcgatggctattacaaccgctactggatattaaagggattagttcacgccaagacaccatccaagaattagtcacaaatactcgactacggcaagatttacggcatttgttacgccaaatttacgacctcgaaaggctaacgggtcgggctagttcggggactgcaaatgctagagatttagtcgccttggctgattccctctcccgtttgccagaattagccaacttagtcattgatgctcattcgcctttcctcaaggctttgcaaaaagtaccgccaattttagaagaactggcacaaaaaatacacgctcatctggtagaatcaccaccattacatctcaaagaagggggcttgattcgtcctggtgtcaatcctttattggatgaaagaaaagcgaccgtcgaagcagaccaccaatggattgctaatttagaagtggatgaaagggcgagaacgggaatccctttgctgaaggtgggatttaacgaaacctttggctattacattagtatttcccgcgccaaagctgaccaagtacccgccaattacatccgcaagcaaaccctgaaaaatgaggaacgttacatcaccccggaattgaaggaaagggaagccaggattctcacagcgcgggatgatttacataagttggaatatgaggtttttgtcaccttacgggaagaagtaggagaacaggcggaagcaattcgccacctttcccgcgccgtagccgccgccgatgtgttgtgtggtttagctgagttggcggtttatcaaggttattgtcgtcccgaaatggtgaatggacgagagatagcaattatcgatggtcgccatccggtagtggaacagtccttacctgcggggttctttgtgccaaattccacccagttggggagtaatgaagaaacccaccaacttcctgacttaattattctaactggaccaaatgccagtggtaaaagttgttacctgcgtcaagtgggtttaattcaactaatggcgcagattggcagttttgttccggctaaatctgctaggttgggaatatgcgatcgcatttttacccgcgttggtgcagtggatgatttagccacaggtcaatctacatttatggtggagatgaatgagacagcaaatattctcaatcatgccacatctagatccctagttttattagatgaaattggtagaggaaccgctacttttgacggtctttccatcgcttgggcggttgcagaatatatcgccaccgagattcgttcccggacaatttttgccactcactaccatgaattaaacgaactggcgggaatgttaccaaatgtggctaactatcaggtgacagtgaaagaattaccagaccaaattatctttctgcaccaagtccaaccaggaggcgctgacaagtcctacggtattgaagcgggaaggttagcgggtttaccaaccgtagtcattcaacgggcgaaacaagtcatggggcaaattgagaaacatagtaagattgcgatgggattgcaaaatttggattaa

SEQ ID NO: 4101 - protein, 854 aa, Anabaena variabilis
MTASDIQPTEPHTPPTPHADTRLVDRTKLSKMYQHYVEVKDKYPHALLLYRVGDFFETFFQDAVTVARELELVLTSKHGGEVGRVAMTGVPHHAWERYTTQLVEKGYAVVICDQVEDASEAVGLVRREVTRILTPGTLLEEGMLKSSRNNYLAAVVITSNHWGLAYADISTGEFLTTQDSDLERLTQELMRLQPSEVLVPTNAPDLGTLLRPGETSPHLPECLPPSFCYSLRSQQPFSQAEARSTLLQRFKVRSLEGLGCDHLPLAVRAAGGLLEYVEDTQKAGQVSLQRLRTYTITDYLIVDNQTRRNLEITQTVRDGTFHGSLLWALDKTSTAMGSRALRRWLLQPLLDIKGISSRQDTIQELVTNTRLRQDLRHLLRQIYDLERLTGRASSGTANARDLVALADSLSRLPELANLVIDAHSPFLKALQKVPPILEELAQKIHAHLVESPPLHLKEGGLIRPGVNPLLDERKATVEADHQWIANLEVDERARTGIPLLKVGFNETFGYYISISRAKADQVPANYIRKQTLKNEERYITPELKEREARILTARDDLHKLEYEVFVTLREEVGEQAEAIRHLSRAVAAADVLCGLAELAVYQGYCRPEMVNGREIAIIDGRHPVVEQSLPAGFFVPNSTQLGSNEETHQLPDLIILTGPNASGKSCYLRQVGLIQLMAQIGSFVPAKSARLGICDRIFTRVGAVDDLATGQSTFMVEMNETANILNHATSRSLVLLDEIGRGTATFDGLSIAWAVAEYIATEIRSRTIFATHYHELNELAGMLPNVANYQVTVKELPDQIIFLHQVQPGGADKSYGIEAGRLAGLPTVVIQRAKQVMGQIEKHSKIAMGLQNLD

SEQ ID NO: 4102 - DNA, 2580 bp, Aquifex aeolicus
  CDS (1)..(2580): transl_table=11
atggagaaatctgagaaagagctcactcccatgctctcacaataccactacttcaaaaatcagtaccccgactgtttgcttctcttcagactcggagacttttacgagctcttttacgaagacgcttacataggctctaaagaactgggacttgttctcacctcaagacccgcgggaaagggaaaggaaaggatacccatgtgcggagttccctaccactccgcaaactcctacatagctaaactcgtaaacaagggatacaaagtagccatatgcgagcaggtggaggatccttctaaggcaaaaggtatcgtaaagagggaggtagtaagggtaatcactcccggaactttctttgaaagggacacgggaggactcgcatcactctacaaaaaaggaaatcattactacgtaggttatctaaaccttgcggtaggggagttcttgggagctaaggtaaagatagaggaactccttgaccttctctcaaagttaaacataaaagaaatactcgtaaaaaaaggggaaaaattaccagaagaactggaaaaagttttgaaggtttacgtaagcgagctggaagaggagttctttgaagaagggagtgaagaaattttaaaggatttcggggttttgagccttcaagccttcggttttgaagaggacacttattcccttcccttgggagctgtttacaagtacgcaaaaacgacacaaaagggctacacacctctcattccgagaccaaaaccttacagagatgaaggcttcgtaagactcgacataaaagcgataaaagggcttgaaattctggaaagccttgagggtagaaaggacatatctctcttcaaggtaatagacagaaccttaacggggatgggaaggaggaggctaaagttcaggcttctttctccctttcgtagcagggaaaagattgaaaggatacaggaaggtgtgcaggagttaaaagaaaacagggaagcgcttttgaagataaggcagatactggagggaatggcggacctagaaagactcgtttccaagataagctctaacatggcaacaccgagggagctcgtttacctcaaaaactccctgaaaaaagtggaagaactcagactcctccttttggaattaaaggctcccatcttcaaggaaatcttacaaaactttgaagacacaaaaaagataataaacgacatagaaaagacgctcgttgaggaccctccccttcacgtaaaagagggcgggctcataagggaaggtgtgaacgcgtatcttgacgaactcaggttcatcagggacaacgctgaaacttacctcagggagtacgaaaaaaaactgaggcaagagacgggcatccagagcctgaagattggctacaacaaggttatgggctactacatagaagtgacaaagccaaacctaaagtacgtcccttcctacttcaggagaaggcaaactctttctaactccgagcgtttcaccacggaagaactccagagacttgaggagaaaatactttccgcccagacacgcataaacgaccttgagtacgaactctataaagagctcagggaaagagtagtaaaggaactggacaaagtaggaaacaacgcaagtgcggttgcggaagttgacttcattcagtcccttgcacaaatagcttacgagaaggactgggcaaaaccccaaatccacgaaggttatgagctgataatagaggagggaaggcatcccgtaatagaagagttcgtagaaaactacgtccctaacgacacgaaattggacagagactccttcatacacgtgataacaggtccgaacatggcgggcaaatccagttatataaggcaggtgggagtcctcacactcctttcccacatcggtagttttatccctgcaaggagagcaaaaatacccgtcgttgacgccctatttacgaggataggttcgggagatgttctggctttaggagtttcaacctttatgaacgagatgcttgaggtttctaatatcctgaacaacgcaaccgaaaaaagtttagtaatcctggacgaggtgggaaggggaacttccacctacgacggcatagctatatcaaaagccatagtaaagtacataagcgaaaagttaaaggcaaaaactcttctcgccacacactttctggaaataaccgagctggaaggaaaaatagaaggagtaaaaaattaccacatggaagtggagaagacccccgaaggaataaggtttttatatattctcaaggaaggaaaggctgaaggcagtttcggtatagaggtagcaaaactcgcaggacttcctgaagaagtggtagaagaggcgaggaaaattttaagagagcttgaagaaaaggaaaacaagaaggaggatatcgttcccttgcttgaggaaaccttcaaaaaatccgaagaggctcaaagacttgaggagtacgaggaaataatcaaaaagattgaagaaatagacatagggaacacaactccccttcaggcactccttatacttgcggagctaaaaaagaagtgcagtttctctaaaaaggagtccggagcttga

SEQ ID NO: 4103 - protein, 859 aa, Aquifex aeolicus
MEKSEKELTPMLSQYHYFKNQYPDCLLLFRLGDFYELFYEDAYIGSKELGLVLTSRPAGKGKERIPMCGVPYHSANSYIAKLVNKGYKVAICEQVEDPSKAKGIVKREVVRVITPGTFFERDTGGLASLYKKGNHYYVGYLNLAVGEFLGAKVKIEELLDLLSKLNIKEILVKKGEKLPEELEKVLKVYVSELEEEFFEEGSEEILKDFGVLSLQAFGFEEDTYSLPLGAVYKYAKTTQKGYTPLIPRPKPYRDEGFVRLDIKAIKGLEILESLEGRKDISLFKVIDRTLTGMGRRRLKFRLLSPFRSREKIERIQEGVQELKENREALLKIRQILEGMADLERLVSKISSNMATPRELVYLKNSLKKVEELRLLLLELKAPIFKEILQNFEDTKKIINDIEKTLVEDPPLHVKEGGLIREGVNAYLDELRFIRDNAETYLREYEKKLRQETGIQSLKIGYNKVMGYYIEVTKPNLKYVPSYFRRRQTLSNSERFTTEELQRLEEKILSAQTRINDLEYELYKELRERVVKELDKVGNNASAVAEVDFIQSLAQIAYEKDWAKPQIHEGYELIIEEGRHPVIEEFVENYVPNDTKLDRDSFIHVITGPNMAGKSSYIRQVGVLTLLSHIGSFIPARRAKIPVVDALFTRIGSGDVLALGVSTFMNEMLEVSNILNNATEKSLVILDEVGRGTSTYDGIAISKAIVKYISEKLKAKTLLATHFLEITELEGKIEGVKNYHMEVEKTPEGIRFLYILKEGKAEGSFGIEVAKLAGLPEEVVEEARKILRELEEKENKKEDIVPLLEETFKKSEEAQRLEEYEEIIKKIEEIDIGNTTPLQALLILAELKKKCSFSKKESGA

SEQ ID NO: 4104 - DNA, 2640 bp, Azoarcus sp
  CDS (1)..(2640): transl_table=11
atgggaatgagtgaaatagcgaaagcagcacagaaagataaagcaatcggcggagccgatagggacagtcacactcccatgatgcagcagtatctccgcatcaaggcgcagcatcctgacacattgctgttctaccgcatgggggacttctacgagctgttcttcgatgacgcggagaaagccgcgcggctgctcgacatcacgctgacgacacgcgggcagtcggccggcacgccgatccgcatggccggagtgcctttccacgcggtcgaacaatacttggcgcggctcgtcaagctcggcgaatcggtcgtgatcgccgagcaggtcggcgagccgggagcgaccaaggggccgatggagcgcgcggtgagccgcatcgtgacgccgggcactttgaccgacgcggcgctgctggacgatcgcatcgactcgctgctgctcgcggccaccctgcaccgcggcgtgctcgggctcgcgtggctcaatctcgccaatggcgacctgcgggtgatggaatgcccggccgagcagttgcaggcgcagttcgaacggctgcgccccgccgaagtgctggtgccggacgggctggcgctgccgctggtcgaatcgctgtcgccggtgctgcgccggcttgccgactggcagttcgacgcgggcaacggtgaacgcctgctgaccgctcatttcggcactcgtgacctggccggcttcgacgccgaaggcctgccggttgcactcgccgccgcagccgcgctgttcgagtacgcgcgcagcacgcagcgccagagcctcgagcacgtcaccggactgcgcgtcgagcgcgaagccgaatacctgcgcctcgatgcggcgacacggcgcaacctggaactgaccgagactctgcgcggagaagcgtcgccgacgctgttttcgctgctcgattcatgcatcaccagcatgggctcgcgctggctgcggcatgcgctgcatcacccgctgcgcgaccgcggagtcgccgcgcaacgccacggggcggtcggggaactcgccggatcggacgccggcgcccccgcggatatcggggacgcgcgaatgctcggcgccgtccgcgctgcgctgcgcggagtcgccgacgtcgatcgcatcactgcgcggattgcgctgcgcagtgcgaggccgcgcgatctggcggcgctgagcgacagtctcgcgcgactgccgcaactgcatgccgcgttgggcaccccgcaggctccgctgctttgcgacctgctcgccgcgatcgcggtgccggacaatgcgctcgatctcctcgtgcgcgccgtcgccgccgagccggccgccgcagtgcgcgacggcggcgtgatcgctcccgggttcgacgcggagctcgacgagctgcgcggcatccagtcgaactgcggcgaattcctgctggccctcgaagtgcgcgaacgcgaacgcagcggcatcgcgaccctcaaggtcgaattcaacaaggtgcatggtttctacatcgaggtgagccacgcgaacactggcaaagtgcccgacgactaccgccgccgccagacgctgaagaacgccgagcgctacatcacgccggaactgaaggcgttcgaggacaaggcgctgtcggcccaggagcgcgcgcttgcccgtgagaagctactctatgaagcgctgctcgaagcgctcgccgcgcatatcccggcgttgcagcgcatcgcccgcgcgctcgcgtgcctcgacggtctgggcgcgttcgccgaagctgccgtgcgccacagctacgtctgcccgcagttttccgcgcagccgggcgtcgacatcatcggcggccgccatccggtcgtcgagcgacaggtcgaagacttcatttccaacaattgccgcctcgcaccgacgcgccgcatgctgctgatcaccggaccgaacatgggcggcaaatcgacgttcatgcgccaggtcgcgctgatcgccctgctcgctcacgtcggcgcgttcgtgccggcgcgaagcgcccgcctcggcccgctcgacgcgatcttcacccgcatcggcgcatccgacgatctcgcctcaggccgctccacgttcatggtcgagatgactgaggcgtcggcgatcctgcacggcgcgaccgaacagagcctcgtgctgatggacgagatcggccgcggcacttcgactttcgacgggctcgcgctggcattcgcaatcgcccgtcacctgctcgagaaaaaccgctgcctgacgctgttcgcgacgcattacttcgagctcacccgcctcaacggcgactacccggaatgcgcgaacgtgcacctcgacgccgtcgaacacgcgcaccgcatcgtgttcctgcacgcggtcgaggacgggcccgcaagccagagctacggcattgaagtcgcggcgctcgccggcattccgggctcggttgtgcgcgaggcgaaacggcgcctgcgcgcactcgagaaccgcgaagtcggcaatgggccgcaggcggacctctttgccgcgctgccggatcgtgaacccgcgacgccgtcgcacccggcgctcaccgcgctggccgaacttgaccccgacacactgagcccgcgcgaggcgctcgaacgcctgtatgcgctgaaacggatgaccgcatga

SEQ ID NO: 4105 - protein, 879 aa, Azoarcus sp
MGMSEIAKAAQKDKAIGGADRDSHTPMMQQYLRIKAQHPDTLLFYRMGDFYELFFDDAEKAARLLDITLTTRGQSAGTPIRMAGVPFHAVEQYLARLVKLGESVVIAEQVGEPGATKGPMERAVSRIVTPGTLTDAALLDDRIDSLLLAATLHRGVLGLAWLNLANGDLRVMECPAEQLQAQFERLRPAEVLVPDGLALPLVESLSPVLRRLADWQFDAGNGERLLTAHFGTRDLAGFDAEGLPVALAAAAALFEYARSTQRQSLEHVTGLRVEREAEYLRLDAATRRNLELTETLRGEASPTLFSLLDSCITSMGSRWLRHALHHPLRDRGVAAQRHGAVGELAGSDAGAPADIGDARMLGAVRAALRGVADVDRITARIALRSARPRDLAALSDSLARLPQLHAALGTPQAPLLCDLLAAIAVPDNALDLLVRAVAAEPAAAVRDGGVIAPGFDAELDELRGIQSNCGEFLLALEVRERERSGIATLKVEFNKVHGFYIEVSHANTGKVPDDYRRRQTLKNAERYITPELKAFEDKALSAQERALAREKLLYEALLEALAAHIPALQRIARALACLDGLGAFAEAAVRHSYVCPQFSAQPGVDIIGGRHPVVERQVEDFISNNCRLAPTRRMLLITGPNMGGKSTFMRQVALIALLAHVGAFVPARSARLGPLDAIFTRIGASDDLASGRSTFMVEMTEASAILHGATEQSLVLMDEIGRGTSTFDGLALAFAIARHLLEKNRCLTLFATHYFELTRLNGDYPECANVHLDAVEHAHRIVFLHAVEDGPASQSYGIEVAALAGIPGSVVREAKRRLRALENREVGNGPQADLFAALPDREPATPSHPALTALAELDPDTLSPREALERLYALKRMTA

SEQ ID NO: 4106 - DNA, 2640 bp, Bacteroides fragilis
  CDS (1)..(2640): transl_table=11
atgaacttaaaaagaagactatccgtgagcaatgatattgaattaaccccgatgatgaaacagtttcttgacctgaaggctaagcatccggatgcagtgatgctgttccggtgcggagacttctatgaaacttattctaccgatgcgattattgcagctgaaatattaggaattactctcacaaaacgtgccaatggaaagggtaaaaccgttgagatggcgggatttccgcatcatgcgttagatacatacctgccgaaattgatccgtgcaggtaagcgggtggccatatgtgaccagcttgaagatcctaagacaacgaagaaattggtgaagcgtggcattacggagttagttactccgggtgtttcgatcaatgataatgtcttaaattataaggaaaataactttctggcagctgttcattttggaaaatcggcttgtggtattgcatttctggatatttctaccggagagttcctgacggctgaaggaccttttgactatgtagataagctgctgaataattttgctccgaaagagattcttttcgaacgtgggaaacgcggaatgtttgagggaaatttcggaagtaagttctttacttttgaactggatgattgggtatttaccgaatccagttcccgggagaagttgctgaagcattttgaaacaaagaatctgaaaggattcggggttgagcatctcaagaatggtattatagcttccggagctatcctgcaatatctggatatgacggaacatacacaggtaggacatatcacttcgctggcacgtatcgaggaagacaaatatgtgcgtcttgataaatttacagtgcgcagcctggagttgatcggtagcatgaacgatggtggcagcagtttgcttcatgttattgacaagactatcagtcctatgggagcccgtctgttgaagcgttggatggtatttcctttaaaagatgagaaacccattaatgaccggctgaatgtagtagaatacttctttcgtaaaccggatttcagggagttgattgaagacgaactgcatcggatcggagatttggaacgtatcatttcaaaagtagccgtcgggcgtgtttctcctcgtgaggtagtacagttaaaagttgctttacaagcaattgaacctattaaagaggcttgtcaacaggccgataatccgagtttgaaccgaatcggtgagcagttgaatctttgtatttctattcgtgaccggattgaaaaagagattaataatgatcctcctctgttgataaataaggggggagtcataaaagatggtgtagatacggaattggatgagcttcggcagattgcttattctggcaaagattatctgcttaagatacagcaacgtgaaagtgaactgacaggaatacctagtttgaagattgcttataacagtgttttcggatactatattgaagtgcggaatgtgcataaagataaagtgccgcaagagtggatacgtaagcagacgttggtaaatgcggagcgttatatcactcaggaactgaaagaatatgaagagaaaattctgggtgccgaagacaagatcctggtattggagactcgcctgtatacagaacttgtacaggcattgagtgaatttatacctgccatccagatcaatgctaaccagatagcccgcattgactgcctgctttcatttgccaatgtagccaaagagaacaattatatccgcccggtgattgaagataatgatgtattggatattcgtcaggggcggcatccggtaattgaaaagcaactgcctatcggagaaaaatatatagctaacgatgtgttgttggataacgctacccagcaggttatcattattaccggtccgaatatggccggtaagtcggccctgttaaggcagactgcattgatcaccctgcttgcccagattggttcgttcgttccggccgaaagcgctcatatcggattggtagataagatttttactcgggtcggtgccagtgacaatatctctgtaggagaatctacttttatggtcgagatgaatgaagcgtctgatattctgaataatatttcttcccgaagccttgtcctgttcgatgaattgggacgcggaacttctacttacgacggaatatccatagcttgggctattgtagagtatatccatgagcatccgaaggcaaaggcacgtacactttttgctactcactaccatgaactgaacgaaatggagaaatcctttaagcgtattaagaattataacgtatcggttaaggaggtggataacaaagttattttcctccggaaacttgaaaggggcggaagtgagcactcgttcggtatccatgtggccaagatggcaggcatgcctaaaagtattgtgaaacgtgccaatgaaattctgaagcaactcgaatctgacaaccgccagcagggaatttcgggtaagccgctggcagaagtcagtgagaatcgcggaggtatgcagttgagtttctttcagcttgatgacccgatcttgtgtcagatccgggatgaaatacttcatctggatgtgaataatcttactccgattgaggcattaaacaaactgaatgatatcaaaaagatagtcaggggaaaataa

SEQ ID NO: 4107 - protein, 879 aa, Bacteroides fragilis
MNLKRRLSVSNDIELTPMMKQFLDLKAKHPDAVMLFRCGDFYETYSTDAIIAAEILGITLTKRANGKGKTVEMAGFPHHALDTYLPKLIRAGKRVAICDQLEDPKTTKKLVKRGITELVTPGVSINDNVLNYKENNFLAAVHFGKSACGIAFLDISTGEFLTAEGPFDYVDKLLNNFAPKEILFERGKRGMFEGNFGSKFFTFELDDWVFTESSSREKLLKHFETKNLKGFGVEHLKNGIIASGAILQYLDMTEHTQVGHITSLARIEEDKYVRLDKFTVRSLELIGSMNDGGSSLLHVIDKTISPMGARLLKRWMVFPLKDEKPINDRLNVVEYFFRKPDFRELIEDELHRIGDLERIISKVAVGRVSPREVVQLKVALQAIEPIKEACQQADNPSLNRIGEQLNLCISIRDRIEKEINNDPPLLINKGGVIKDGVDTELDELRQIAYSGKDYLLKIQQRESELTGIPSLKIAYNSVFGYYIEVRNVHKDKVPQEWIRKQTLVNAERYITQELKEYEEKILGAEDKILVLETRLYTELVQALSEFIPAIQINANQIARIDCLLSFANVAKENNYIRPVIEDNDVLDIRQGRHPVIEKQLPIGEKYIANDVLLDNATQQVIIITGPNMAGKSALLRQTALITLLAQIGSFVPAESAHIGLVDKIFTRVGASDNISVGESTFMVEMNEASDILNNISSRSLVLFDELGRGTSTYDGISIAWAIVEYIHEHPKAKARTLFATHYHELNEMEKSFKRIKNYNVSVKEVDNKVIFLRKLERGGSEHSFGIHVAKMAGMPKSIVKRANEILKQLESDNRQQGISGKPLAEVSENRGGMQLSFFQLDDPILCQIRDEILHLDVNNLTPIEALNKLNDIKKIVRGK

SEQ ID NO: 4108 - DNA, 2589 bp, Bacteroides fragilis
  CDS (1)..(2589): transl_table=11
atgatgaaacagtttcttgacctgaaggctaagcatccggatgcagtgatgctgttccggtgcggagacttctatgaaacttattctaccgatgcgattattgcagctgaaatattaggaattactctcacaaaacgtgccaatggaaagggtaaaaccgttgagatggcgggatttccgcatcatgcgttagatacatacctgccgaaattgatccgtgcaggtaagcgggtggccatatgtgaccagcttgaagatcctaagacaacgaagaaattggtgaagcgtggcattacggagttagttactccgggtgtttcgatcaatgataatgtcttaaattataaggaaaataactttctggcagctgttcattttggaaaatcggcttgtggtattgcatttctggatatttctaccggagagttcctgacggctgaaggaccttttgactatgtagataagctgctgaataattttgctccgaaagagattcttttcgaacgtgggaaacgcggaatgtttgagggaaatttcggaagtaagttctttacttttgaactggatgattgggtatttaccgaatccagttcccgggagaagttgctgaagcattttgaaacaaagaatctgaaaggattcggggttgagcatctcaagaatggtattatagcttccggagctatcctgcaatatctggatatgacggaacatacacaggtaggacatatcacttcgctggcacgtatcgaggaagacaaatatgtgcgtcttgataaatttacagtgcgcagcctggagttgatcggtagcatgaacgatggtggcagcagtttgcttcatgttattgacaagactatcagtcctatgggagcccgtctgttgaagcgttggatggtatttcctttaaaagatgagaaacccattaacgaccggctgaatgtagtagaatacttctttcgtaaaccggatttcagggagttgattgaagacgaactgcatcggatcggagatttggaacgtatcatttcaaaagtagccgtcgggcgtgtttctcctcgtgaggtagtacagttaaaagttgctttacaagcaattgaacctattaaagaggcttgtcaacaggccgataatccgagtttgaaccgaatcggtgagcagttgaatctttgtatttctattcgtgaccggattgaaaaagagattaataatgatcctcctctgttgataaataaggggggagtcataaaagatggtgtagatacggaattggatgagcttcggcagattgcttattctggcaaagattatctgcttaagatacagcaacgtgaaagtgaactgacaggaatacctagtttgaagattgcttataacagtgttttcggatactatattgaagtgcggaatgtgcataaagataaagtgccgcaagagtggatacgtaagcagacgttggtaaatgcggagcgttatatcactcaggaactgaaagaatatgaagagaaaattctgggtgccgaagacaagatcctggtattggagactcgcctgtatacagaacttgtacaggcattgagtgaatttatacctgccatccagatcaatgctaaccagatagcccgcattgactgcctgctttcatttgccaatgtagccaaagagaacaattatatccgcccggtgattgaagataatgatgtattggatattcgtcaggggcggcatccggtaattgaaaagcaactgcctatcggagaaaaatatatagctaacgatgtgttgttggataacgctacccagcaggttatcattattaccggtccgaatatggccggtaagtcggccctgttaaggcagactgcattgatcaccctgcttgcccagattggttcgttcgttccggccgaaagcgctcatatcggattggtagataagatttttactcgggtcggtgccagtgacaatatctctgtaggagaatctacttttatggtcgagatgaatgaagcgtctgatattctgaataatatttcttcccgaagccttgtcctgttcgatgaattgggacgcggaacttctacttacgacggaatatccatagcttgggctattgtagagtatatccacgagcatccgaaggcaaaggcacgtacactttttgctactcactaccatgaactgaacgaaatggagaaatcctttaagcgtattaagaattataacgtatcggttaaggaggtggataacaaagttattttcctccggaaacttgaaaggggcggaagtgagcactcgttcggtatccatgtggccaagatggcaggcatgcctaaaagtattgtgaaacgtgccaatgaaattctgaagcaactcgaatctgacaaccgccagcagggaatttcgggtaagccgctggcagaagtcagtgagaatcgcggaggtatgcagttgagtttctttcagcttgatgacccgatcttgtgtcagatccgggatgaaatacttcatctggatgtgaataatcttactccgattgaggcattaaacaaactgaatgatatcaaaaagatagtcaggggaaaataa

SEQ ID NO: 4109 - protein, 862 aa, Bacteroides fragilis
MMKQFLDLKAKHPDAVMLFRCGDFYETYSTDAIIAAEILGITLTKRANGKGKTVEMAGFPHHALDTYLPKLIRAGKRVAICDQLEDPKTTKKLVKRGITELVTPGVSINDNVLNYKENNFLAAVHFGKSACGIAFLDISTGEFLTAEGPFDYVDKLLNNFAPKEILFERGKRGMFEGNFGSKFFTFELDDWVFTESSSREKLLKHFETKNLKGFGVEHLKNGIIASGAILQYLDMTEHTQVGHITSLARIEEDKYVRLDKFTVRSLELIGSMNDGGSSLLHVIDKTISPMGARLLKRWMVFPLKDEKPINDRLNVVEYFFRKPDFRELIEDELHRIGDLERIISKVAVGRVSPREVVQLKVALQAIEPIKEACQQADNPSLNRIGEQLNLCISIRDRIEKEINNDPPLLINKGGVIKDGVDTELDELRQIAYSGKDYLLKIQQRESELTGIPSLKIAYNSVFGYYIEVRNVHKDKVPQEWIRKQTLVNAERYITQELKEYEEKILGAEDKILVLETRLYTELVQALSEFIPAIQINANQIARIDCLLSFANVAKENNYIRPVIEDNDVLDIRQGRHPVIEKQLPIGEKYIANDVLLDNATQQVIIITGPNMAGKSALLRQTALITLLAQIGSFVPAESAHIGLVDKIFTRVGASDNISVGESTFMVEMNEASDILNNISSRSLVLFDELGRGTSTYDGISIAWAIVEYIHEHPKAKARTLFATHYHELNEMEKSFKRIKNYNVSVKEVDNKVIFLRKLERGGSEHSFGIHVAKMAGMPKSIVKRANEILKQLESDNRQQGISGKPLAEVSENRGGMQLSFFQLDDPILCQIRDEILHLDVNNLTPIEALNKLNDIKKIVRGK

SEQ ID NO: 4110 - DNA, 2598 bp, Bacillus halodurans
  CDS (1)..(2598): transl_table=11
atggcactacaaactcctatgatgaagcaatatttagagatcaaggcacaatacaaagatgcctttttatttttccgtttaggtgatttctacgaactttttttagatgacgctgttaaggctgcacaggaactagaaataacgctaacgggtagaggaaaaggggaggaacgtatcccgatgtgcggcgttccataccattcggccgatcattacatttctcgtctgctcgagaaagggtataaaattgcgatttgtgagcaagtagaagacccaaagaatgccaaaggtgtagtgaagcgtgaagtgattaagctgatcacccctggtacaatcatggacgggaaattaattgttgaaaaggagaacaattttttatgcgcggtaacgaggtttgaagatcagagctatggcatcgctcgcgccgatttaacgacaggtgaaagcagggttagtcttgtaagtgaacaggatgatttgttccatgaacttgcttcttcaagcataaaggaggtcgtcctgagtccaggctggactgaagaagacgctcaccgtttgcgtcaatcgctctcggtcactttgtctgaggaagaggcagaggacctgccaaaaggttacgaatccctatgtgaaaacgtggaacaaccaaagttgctgcgagcatttggccgacttttgcagtatttgttacggacgcaaaagcgttcgcttgagcatttacagcctgttcaatatgatccaccaaatgaagtgatgaaaatcgatcttcattctagacggaacctagagctagtggaaacgttgcgggaaaaaaagaaaaagggttcccttctttgggctgtggatgaaacggtgacggccatgggggggcggctgttgaagcaatgggttgaacgtccactgctctcgaagaaagaaatcgagcggagacaagggctagttcaatcgttccttgatcattattttgagcgggaagaactgcgtgatgagctacgccatgtttatgatttagaacgactcgtcggaaaagtggcctacggaaatgtcaatgcaagggagctcgttcagttacgcaaatcattgcagagaattccggcaatctttgcccttgtagaaaaaatcggtaatcaagatgtaaatgagcgattgcaaacgatcgatcgctgtgaatcattagtcgatttgcttgagcatagcttagtcgatgaccctccggtctcgattaaggaaggcgggatgatccgtgatggttttcacaaggagcttgatacatatcgtgatgcaagtcgaaatgggaagtcatggattgcagagcttgaacaaaaagaacgggaagcgactgggattaaatcgttaaagatcggctacaacaaagtgttcggttattatattgaagtgacgaaagcgaacatacacctactagaggaaggacgctacgagcggaagcaaacgctcacgaatgccgagcgctacgtcaccccagagttaaaggaaaaggaagctctcatcttaaacgctgaggaatccatcgttcagcttgaatacgacttatttttacaagtccgtgagcaagtgaaggactacattcgaccgttgcaagcgctcgcccaaatgattagcgagctcgatgtcattcaagggtttgcaaccgtcagcgaaacccatcattacgtgaggccagcacttcaagaggatcgggcgattgccattaaaggaggacgccatccagttgtcgagcgtgtaattccgaatggtgaatatgtagccaatgacgtagatatgaaagatggacgaagcattctcctcattacagggcccaatatggcggggaaaagcacgtacatgcgccagcttgcgttaattgcgatcatgggacaaatcggttgctttgttcctgcggatgaagcgaggctgccgatctttgaccaagtgtttacgagaattggggcagcggatgacttagctagcggacaaagcacgttcatggtggaaatgctagaaacaaaatatgcgctacaaaaggcgacacaaaacagcctcatcctgctcgatgaaattggtcgcggcacctccacctatgatggaatggcactcgcccaagcgattattgaatacattcatgatgaaattcgtgcaaaaacgctgttttctacccattatcacgagttaacagctcttgaaaaggagctttctgacgtaaaaaatgttcacgtgtcggcagtggaagagcaaggaacggtcgtgtttttgcataaagtcgtcgatggacaagccgatcgaagctatggaatctatgtagcagagcttgcaggattgccaaatgtggtcaccgaacgggccgaaacgctactagctgaacttgaaggggagaaggagatagtcgcttccgagaaggaagtagcgtctactaacgagcctacgcagctttccttgtttgaaccagaaccgttggaagcgtacaagcccaaagggaacaaacagccgttatcggacgaggaaaaaacagtactacatgaccttcagtcggtcgatgtcctaaacacgacccctttggaggcgattcgtttattaaatcagtggcagcaaaaattacgttag

SEQ ID NO: 4111 - protein, 865 aa, Bacillus halodurans
MALQTPMMKQYLEIKAQYKDAFLFFRLGDFYELFLDDAVKAAQELEITLTGRGKGEERIPMCGVPYHSADHYISRLLEKGYKIAICEQVEDPKNAKGVVKREVIKLITPGTIMDGKLIVEKENNFLCAVTRFEDQSYGIARADLTTGESRVSLVSEQDDLFHELASSSIKEVVLSPGWTEEDAHRLRQSLSVTLSEEEAEDLPKGYESLCENVEQPKLLRAFGRLLQYLLRTQKRSLEHLQPVQYDPPNEVMKIDLHSRRNLELVETLREKKKKGSLLWAVDETVTAMGGRLLKQWVERPLLSKKEIERRQGLVQSFLDHYFEREELRDELRHVYDLERLVGKVAYGNVNARELVQLRKSLQRIPAIFALVEKIGNQDVNERLQTIDRCESLVDLLEHSLVDDPPVSIKEGGMIRDGFHKELDTYRDASRNGKSWIAELEQKEREATGIKSLKIGYNKVFGYYIEVTKANIHLLEEGRYERKQTLTNAERYVTPELKEKEALILNAEESIVQLEYDLFLQVREQVKDYIRPLQALAQMISELDVIQGFATVSETHHYVRPALQEDRAIAIKGGRHPVVERVIPNGEYVANDVDMKDGRSILLITGPNMAGKSTYMRQLALIAIMGQIGCFVPADEARLPIFDQVFTRIGAADDLASGQSTFMVEMLETKYALQKATQNSLILLDEIGRGTSTYDGMALAQAIIEYIHDEIRAKTLFSTHYHELTALEKELSDVKNVHVSAVEEQGTVVFLHKVVDGQADRSYGIYVAELAGLPNVVTERAETLLAELEGEKEIVASEKEVASTNEPTQLSLFEPEPLEAYKPKGNKQPLSDEEKTVLHDLQSVDVLNTTPLEAIRLLNQWQQKLR

SEQ ID NO: 4112 - DNA, 2610 bp, Bacillus licheniformis
  CDS (1)..(2610): transl_table=11
atggcaggctacacgcctatgatacagcaatatttaaagattaaggcagagtatcaggatgcctttttattttttcgtcttggcgacttttatgagatgttttttgaagatgcaaaaaaggcgtctcaggagctcgaaatcacgctgacgagcagggacggaggatcaagcgaaagaattccgatgtgcggggttccttatcattcctgctcttcgtatatcgaacagctcattaaaaaaggctataaagtcgcgatctgtgaacaggtggaggaccctaaatcggccaaaggagtcgtcaaaagggaagtcgtgcagctgatcacacccggcaccgtgatggacggcaaagggattcatgaaaatgaaaacaactttatcgcctctgtcagtaaatttcagcatacatacgggctcgctttttctgatttgacgacaggcgagaatttagtaacggctatcgaaaggcttgatgatgtcgtttccgaaatttactctgtcggagcaagggaaatcgtcgtcagccgcaaccttgacgagaaagacgtcgcaatgctgaaagagcgctgcggcgccacgatctctttcgaggatgaacaagcggatgaagtgcctggcattgtgaacggactggggtccaaagagcttgtcgatacgtttatgaggctttacgtctacttgaagcggacgcagaaaagaagcctcgaccaccttcaaaacgttcaggcctacgagctcgaagaagcgatgaaaatcgatttgtactcgaaacgcaatcttgaactgacggaaacgatccgttcgaaaaacaaaaaaggctcgcttctttggcttttggatgaaacgaaaacggccatgggagggcggctgttaaagcaatggatcgacaggccgctgatcagaaagggacagatcgaagagcgccaggaaatcgttgaaacgctgatcgcccatctgtttgagcgggaagatttgcgcgaacggctgaaggaagtatacgacctcgagcggctcgccggaagggtcgcatacggcaacgtcaacgccagagatttgatccagctgaaggaatcgctgaaacaagtcccggccatcaaacagcttgtcggctccctcgaccatccgaaagcaaaagcgcgcgccgagaaaatcgatccgtgcggcgatcttttgaatcttttggaagacgcgctatacgagaatccgcctctttcattaaaagaggggaacttaatcaaagacggctaccacgcgaaactggatgaatacagggacgcaagcaagaacggaaaagactggatcgcaaggcttgagcagcaggaacgcgagtacacgggaatccgctctttaaaagtcggctttaacaaggtgttcggctattatattgaagtgacgaaagcgaacatccatctgcttgaagaaggccgctatgaacggaagcagacgctgaccaatgcagaacgctacatcacgccggagctgaaagaaaaagaagccctgattctcgaagcggaaaacaatatttgcgagctggagtatgagctgttttccgagcttcgcagcaaggtgaaggaatatatcccgcgcttgcagcagctggcaaaaatgatgagcgagcttgatgtgctccaatgttttgcgacgatcagcgaaaaccggcactatgttaagccggagttttccgatgatgtcgttcaggtgatcgacggacggcatccggtcgtagaaaaggtgatggacagccagtcttacgttccgaacagctgtgaaatgggcaaaggcaggcagatgcttttaatcaccgggccgaatatgtccgggaaaagcacgtatatgagacagatggcgctgatctccattttggcgcagatcggctgctttgttcctgcgaaaaaagcggtgctgccgatctttgatcagatctttacgagaattggcgcagcggatgatcttatatccggacagagcacgtttatggtggaaatgcttgaagccaaaaacgcgatcgtccatgcgacgaaaaacagcttgattttatttgacgaaatcggccggggtacgtccacttacgacggaatggcgcttgcacaagcgatcatcgagtacgttcacgagcacatcggcgcgaagactttattttccactcactaccacgagctgacgtcccttgaagaaaagctggacgatttgaagaatgtccacgttcgtgcggaagaatacgaaggaaaggtcgttttccttcaccagataaaagaaggagcagcagataaaagctacggtatccatgtcgcgcagctggctgaattgcccgacggtttgatcagcagggcgaaaacgatcctgaaagaacttgaatccggcgcaaaagaagccgctccatcaacggcaccgaatatggtaaaagaggcggcggaagaagccgcggcgactgttgcagatcaaccggcccagctgtcattttttgagacggacaagccaatagaaaaagagacgaagctctccaaaaaagagcaggctgttttagccgaatttaaagcgatggatctgctcgatatgacgcctatacaagtcatgaatgaactgtacaggctgcaaaaaaaattaaagtaa

SEQ ID NO: 4113 - protein, 869 aa, Bacillus licheniformis
MAGYTPMIQQYLKIKAEYQDAFLFFRLGDFYEMFFEDAKKASQELEITLTSRDGGSSERIPMCGVPYHSCSSYIEQLIKKGYKVAICEQVEDPKSAKGVVKREVVQLITPGTVMDGKGIHENENNFIASVSKFQHTYGLAFSDLTTGENLVTAIERLDDVVSEIYSVGAREIVVSRNLDEKDVAMLKERCGATISFEDEQADEVPGIVNGLGSKELVDTFMRLYVYLKRTQKRSLDHLQNVQAYELEEAMKIDLYSKRNLELTETIRSKNKKGSLLWLLDETKTAMGGRLLKQWIDRPLIRKGQIEERQEIVETLIAHLFEREDLRERLKEVYDLERLAGRVAYGNVNARDLIQLKESLKQVPAIKQLVGSLDHPKAKARAEKIDPCGDLLNLLEDALYENPPLSLKEGNLIKDGYHAKLDEYRDASKNGKDWIARLEQQEREYTGIRSLKVGFNKVFGYYIEVTKANIHLLEEGRYERKQTLTNAERYITPELKEKEALILEAENNICELEYELFSELRSKVKEYIPRLQQLAKMMSELDVLQCFATISENRHYVKPEFSDDVVQVIDGRHPVVEKVMDSQSYVPNSCEMGKGRQMLLITGPNMSGKSTYMRQMALISILAQIGCFVPAKKAVLPIFDQIFTRIGAADDLISGQSTFMVEMLEAKNAIVHATKNSLILFDEIGRGTSTYDGMALAQAIIEYVHEHIGAKTLFSTHYHELTSLEEKLDDLKNVHVRAEEYEGKVVFLHQIKEGAADKSYGIHVAQLAELPDGLISRAKTILKELESGAKEAAPSTAPNMVKEAAEEAAATVADQPAQLSFFETDKPIEKETKLSKKEQAVLAEFKAMDLLDMTPIQVMNELYRLQKKLK

SEQ ID NO: 4114 - DNA, 2589 bp, Bacteroides thetaiotaomicron
  CDS (1)..(2589): transl_table=11
atgatgaaacagtttctggatttgaaagccaaacatccggatgcagtgatgctgtttcgttgcggtgacttttatgaaacatattctaccgatgccattgttgcatccgaaatcttaggaatcacactgacaaaacgcgccaatggaaaaggaaagactatcgagatggcaggatttccccatcatgcgcttgatacatatcttccgaaactgattcgtgccggaaagcgtgtagctatctgtgaccagctggaagacccgaaactgacgaagaaactggtgaaaagaggtattaccgagttggttacccccggtgtatctatcaatgataacgttctgaattataaggagaataacttcctggctgccgtccatttcggaaaggcttcctgtggagttgcctttcttgatatatctaccggtgagttcctcaccgccgaaggtccctttgactatgtagacaaattgctgaataacttcggaccgaaagagattcttttcgaacggggcaaacgcctgatgtttgaaggtaacttcggcagcaagttcttcacattcgaactggacgactgggtatttaccgaatccactgcccgtgagaaactactgaaacactttgagacaaagaatctgaaaggattcggggtggagcacctgaagaatggtatcattgcttccggtgctatcctgcaatacctgacgatgacacagcatacgcagatcggtcacattacttcccttgcccgtatcgaggaggataagtatgtgcgtctggataagtttacagttcgcagcctggagctgatcggcagcatgaatgacggcggcagcagtttgctgaacgtgatcgaccgtaccatcagtccgatgggagcccgcctgctgaaacgctggatggttttcccgttgaaggatgagaagccgatcaacgaccgactgaatgtggtggaatacttcttccgccagccggattttaaagagctgatcgaggagcagttgcatctgataggagacttggaacgtatcatttccaaagtagccgtaggacgtgtgtcgccacgtgaggtggtacagttgaaggttgccttgcaggccattgaaccgatcaagcaggcttgtcttgaagcggataacgcaagtttgaaccggataggtgaacagctgaatctttgtatttctattcgcgaccggattgccaaagaaatcaataatgaccctcctttattgatcaacaaagggggcgtgattaaagatggtgtgaatgaggaactggacgaattacgccgtatttcatactccggcaaagactatctgttgcagatacagcagcgtgaaagtgagcagacaggcattccgagtctgaaggtagcttacaataatgtattcggttattatattgaagtccgcaatatacataaggataaagttccgcaggaatggattcgcaagcagacactggtcaatgcggaacgttatattacgcaggaactgaaggtttacgaagaaaagattctgggagccgaagataagattctcgtgctggagactcagttatataccgatttggtgcaggcattgacggagtttattccgcagatacagattaatgcgaatcagattgctcgtctggactgtctgttgtctttcgctaatgtggcgcgtgagaataattatatccgtccggttattgaggacaatgatgtactggatatccgtcagggacgtcaccctgtgattgaaaagcagcttccgattggtgagaagtatattgccaatgacgtgatgctggacagcgcgtcacagcagattatcatcatcaccggtcccaatatggccggtaagtccgcgctcttgcgtcagacggcactgattacgctgttggcgcaaatcggttcgtttgttcctgcggagagtgcccatatcggtctggtggataagattttcacccgtgtaggtgccagcgataatatctcggtgggcgaatctacttttatggtggaaatgaatgaggctgcggatattctgaataatgtctcttccagaagtctggtgttatttgatgagttgggacgtggtacgtctacctatgacggtatttccattgcctgggcaatcgtcgagtatatccacgaacatccgaaagcgaaagcccgtacactgtttgctacgcattaccatgagctgaacgagatggagaaatccttcaaacgcatcaagaactataacgtgtctgtgaaggaagtggacaataaagtgattttcctccgtaagctggagcgtgggggaagcgaacactccttcggtattcatgtagcaaagatggcaggtatgccgaagagtattgtgaagcgtgcaaatactatattgaagcaactggaatcggacaaccgccagcaaggtatttccggcaaaccattgacggaagtcagtgaaaacagaagcggtatgcagctcagcttcttccagttggacgacccgatcctttgccagattcgggatgagatactgaatctggatgtgaataaccttactccgattgaggcgttgaataagctgaacgatataaagaagatagtcagaggcaaataa

SEQ ID NO: 4115 - protein, 862 aa, Bacteroides thetaiotaomicron
MMKQFLDLKAKHPDAVMLFRCGDFYETYSTDAIVASEILGITLTKRANGKGKTIEMAGFPHHALDTYLPKLIRAGKRVAICDQLEDPKLTKKLVKRGITELVTPGVSINDNVLNYKENNFLAAVHFGKASCGVAFLDISTGEFLTAEGPFDYVDKLLNNFGPKEILFERGKRLMFEGNFGSKFFTFELDDWVFTESTAREKLLKHFETKNLKGFGVEHLKNGIIASGAILQYLTMTQHTQIGHITSLARIEEDKYVRLDKFTVRSLELIGSMNDGGSSLLNVIDRTISPMGARLLKRWMVFPLKDEKPINDRLNVVEYFFRQPDFKELIEEQLHLIGDLERIISKVAVGRVSPREVVQLKVALQAIEPIKQACLEADNASLNRIGEQLNLCISIRDRIAKEINNDPPLLINKGGVIKDGVNEELDELRRISYSGKDYLLQIQQRESEQTGIPSLKVAYNNVFGYYIEVRNIHKDKVPQEWIRKQTLVNAERYITQELKVYEEKILGAEDKILVLETQLYTDLVQALTEFIPQIQINANQIARLDCLLSFANVARENNYIRPVIEDNDVLDIRQGRHPVIEKQLPIGEKYIANDVMLDSASQQIIIITGPNMAGKSALLRQTALITLLAQIGSFVPAESAHIGLVDKIFTRVGASDNISVGESTFMVEMNEAADILNNVSSRSLVLFDELGRGTSTYDGISIAWAIVEYIHEHPKAKARTLFATHYHELNEMEKSFKRIKNYNVSVKEVDNKVIFLRKLERGGSEHSFGIHVAKMAGMPKSIVKRANTILKQLESDNRQQGISGKPLTEVSENRSGMQLSFFQLDDPILCQIRDEILNLDVNNLTPIEALNKLNDIKKIVRGK

SEQ ID NO: 4116 - DNA, 2745 bp, Bartonella henselae
  CDS (1)..(2745): transl_table=11
atggataataaaactgataataaaaacaatttaaccccacaatcggctccctcatctgctccacataaagaacgcctcacacctatgatggagcaatatatcgaaatcaaagcagttaatagcgattgccttctgttttaccgtatgggtgatttctatgaattattttttaatgatgcaattgaagctgctcaagttttaggaattacgctcacaacacgcgggaaacatttaggtgaagatattcctatgtgtggtgttccagttcatactgcggatgattatttacaaaaattgatctcctgtggttatcgtgttgctgtttgtgaacagacagaagatccagcagaagctaaaaaacggggatcaaaatcaattgttcggcgtgatgttgtgcgccttgtgacacctggaaccctaacagaagaaaaactcctcgacccaacgcgcgcaaactatctgatgacacttgcccgcatcaaaaccagcgatggagaggaatttgccctttcctggattgatatttcaacaggcatatttcgtgtcacagaaagtcgactcgaaaaacttttagcagacattatgcgcgtggatccacaagaaatcattgtggctgattcctttttccacgataaatctcataaatcactttttaatgttctagactgtatcgtttcgcctcaacacgctagtctctttgatgtcatcactgctgaacgcgacatttgcagttattttaaactctcaacccttgaaggcattgctgattattcacgtcccgaactatcggcaattgccgcagctattcgttatatcgaaaaaacacaaatcacgcatcgccctcctctcatgcgtcctgagcgccaaaatgaaagtgctacccttttcattgatgccgcaacgaggttgagtcttgagcttgtacggaccacatcgggacaacgggatggaagcttactaaaggccattgatcgcaccgtaacaggaggggggtcacgccttctcctcgatcgcctcattgcacctcttaccacgccttcagctattgataaacgtctggattcgattgccttttttctgcgcaatacatctcttgcagaagacataaagctcatcttaaaagggggaccagatatgccacgtgctgtctcacgtttggctcttggccgaggaggaccacgtgatatggcttcaattcagcgcggttttgaaattattcgtgaacttcaccagcttcttagcaatgaattgcttcctcaagaaattagtgatgtacaacagattttctcacatttacctactgctttacatttgcgtttagaacaagcattagccgatgatctgcccctgcttaaacgagacggtggttttattcgccctcattatcataaagagctcgatgaaatgcgcactttgcgtgatgaatctcgccgtgttatcgctgaacttcaagcacaatatgctcaagaaacagatattaaaacactcaaaatcaagcataacaatatcctaggctacttcattgaagtaaccaacttacaggcaaccgctctcaccaatactccacaagcaaaagcacgttttattcatcgacaaacaatggcaaatgctatgcgctttaccacaacagaacttgctgaacttgaaagccgtattgctcatgcagccaaccatgcattgacgcttgaattggaaatctttgacactcttgttcatgaaattactgaacaagttgatttcattcgtaaagctgctgaatcacttgctgttttggatgtttctgttgctttagcgcatttggctgaagaacaaggatattgtcgccctaaaattgatcagtctcttaccttttgtattaccgcagggcgccatcccgtcgtagaacaagcactccgaaagcaagcagcagaaccctttgttgctaataactgcgacctctctttgcaagaaaatcaccaatatgcagcgatatggcttttaacaggtcctaatatgggaggaaaatcaacttttttacggcaaaatgctctcatcgccattatggcgcaaatgggatcctttgttccagctacctcagcccatattggcgttgttgatcgcttatttagtcgtgttggtgcttctgatgatcttgcacgagggcgttcaacttttatgatggaaatggtagaaacagcaacgattcttaatcatgctactcagcattcccttgttattcttgatgaaatcggacgaggaacgtcgacttttgatgggctttcaattgcctgggcaaccgttgaatatcttcatgaagttaaccattgtcgtgctattctcgccacacattttcatgaaatgacagcactcacagaaaaacttgatcgtcttcataatgtaaccatgaaagtcaaaaattgggatggtgatgtgatttttcttcacgaagtcacgccgggagctgcggaccgatcctacggcgtacaagttgcaaaacttgctggacttcccaaggcagttattacacgtgctacagacgttctacagcaattagaacaaggtgaaatggcgggaaaaggacataaattaattgatgacttaccgcttttttcccttaaaacaacatcttccctcaatgaagacacaaacaaatattctatgctccatgaagcttttaaaaatatccatcctgacgaactctctcctaagcaagctttagaagccctttatcaccttaaacaacttgaaaaaaataatcccttataa

SEQ ID NO: 4117 - protein, 914 aa, Bartonella henselae
MDNKTDNKNNLTPQSAPSSAPHKERLTPMMEQYIEIKAVNSDCLLFYRMGDFYELFFNDAIEAAQVLGITLTTRGKHLGEDIPMCGVPVHTADDYLQKLISCGYRVAVCEQTEDPAEAKKRGSKSIVRRDVVRLVTPGTLTEEKLLDPTRANYLMTLARIKTSDGEEFALSWIDISTGIFRVTESRLEKLLADIMRVDPQEIIVADSFFHDKSHKSLFNVLDCIVSPQHASLFDVITAERDICSYFKLSTLEGIADYSRPELSAIAAAIRYIEKTQITHRPPLMRPERQNESATLFIDAATRLSLELVRTTSGQRDGSLLKAIDRTVTGGGSRLLLDRLIAPLTTPSAIDKRLDSIAFFLRNTSLAEDIKLILKGGPDMPRAVSRLALGRGGPRDMASIQRGFEIIRELHQLLSNELLPQEISDVQQIFSHLPTALHLRLEQALADDLPLLKRDGGFIRPHYHKELDEMRTLRDESRRVIAELQAQYAQETDIKTLKIKHNNILGYFIEVTNLQATALTNTPQAKARFIHRQTMANAMRFTTTELAELESRIAHAANHALTLELEIFDTLVHEITEQVDFIRKAAESLAVLDVSVALAHLAEEQGYCRPKIDQSLTFCITAGRHPVVEQALRKQAAEPFVANNCDLSLQENHQYAAIWLLTGPNMGGKSTFLRQNALIAIMAQMGSFVPATSAHIGVVDRLFSRVGASDDLARGRSTFMMEMVETATILNHATQHSLVILDEIGRGTSTFDGLSIAWATVEYLHEVNHCRAILATHFHEMTALTEKLDRLHNVTMKVKNWDGDVIFLHEVTPGAADRSYGVQVAKLAGLPKAVITRATDVLQQLEQGEMAGKGHKLIDDLPLFSLKTTSSLNEDTNKYSMLHEAFKNIHPDELSPKQALEALYHLKQLEKNNPL

SEQ ID NO: 4118 - DNA, 2736 bp, Bartonella quintana
  CDS (1)..(2736): transl_table=11
atggataataagactgaccataaaaatgatttaaactcacaacccgttccctcatctgccccacataaagaacgcctcacacctatgatggagcaatatatagaaatcaaagcagttaatagcgattctcttctcttttaccgtatgggtgatttctatgaattatttttcaatgatgcaattgaagctgctcaggttttaggaatcacactcacaacccgtggaaaacatttgggtgaagatattcctatgtgtggtgttccagttcatgctgcggatgattatttgcaaaaactgatctcctccggttatcgcgttgctgtttgtgaacagacagaagatccagcagaagctaaaaaacgtggatcaaaatcaatcgttcggcgcgatgtcgttcgtcttgttacacctggaactataacagaagaaaagcttcttgatccaacccgcgcaaattatctgatgacacttgcccgcattaaaaccagcaagggagaagaatttgccctttcctggattgatatttcaacaggcatatttcgtgtaacagaaagccaccctgaaaaacttttggctgatatcatgcgcgtggatccacaagaaatcattgtagctgactcctttttccatgataaatcgcacaaatcgctttttaatgttcttgatcgtattgtttcgcctcaacacgttagcctctttgatgcagtcaccgctgaacgcgacatttgcagttattttaaactctcaacccttgaaggtgttgccgactattcacgctccgaactttcggcaattgccgctgccattcgttatatcgaaaaaacacaaatcactcaccggcctcctctcatgcgccctgagcgccaaaatgaaaacgctacccttttcattgatgctgcaaccagactaagtcttgaacttattcgaaccacatcgggacaacgtgatggaagcttactaaaagccattgatcgcactgtcacaggagggggatcacgcctcctcgttgatcgcctcattgcacctctcaccacaccttcagctattgataaacgtctggattcgattgccttttttctgcgcaatacatctcttgcagaagccatacagctcatcttaaaagggggaccagatatgccacgtgccgtttcacgtttggctcttggccgaggaggaccacgtgacatagcttcaattcagcgcggttttgaaatcattcatggattgaatcagcttcttaacaatgaattgcttccccaagaaataagtgatgtccaacaggttttctcacatttacctactgctttgcattttcgtttagaacaagcattatccgatgatcttcccctccttaaaagggatggtggttttattcgccctaattatcataaagagctcgatgaaatgcgtgctctgcgtgatgaatctcgccttattattgctgaacttcaagcacaatatgccaaagaaacagatattaaaacactcaaaattaagcataataatattctaggctacttcattgaaataaccaacttacaagcaactgctctcaccaataccccacaagcaaaagcacgttttattcatcgacaaacactggcaaatgttatgcgctttaccacaacagaacttgttgagcttgaaggccgtattgcccatgcagcaacccatgctatgacgcttgaattggaaatctttgacactcttgttcatgaaattactgaacaggttgatttcattcgtaaagctgctgaagcacttgctattttggatgtttctgttgctttagcacgtttggctgaagaacaagaatattgtcgtcctaaaatcgatcagtcacttacctttcgtatcaccgcagggcgccatcctgttgtagagcaagcactccgaaagcaagcagcagaaccatttgttgccaataactgcgacctctctgtacaaaaaaatcatcaatatgcagcaatttggcttttgacaggtcccaatatgggaggaaaatcaacttttttgcggcaaaatgctctcattactattatggcacaaatgggttcttttgttccagcgagttcagcgcatattggcgttgttgatcgcttatttagtcgtgttggtgcttccgatgatcttgcgcgaggacgctcaacttttatgatggaaatggtcgaaacagcaacgattcttaatcatgccagtagccattcccttgttattcttgatgaaataggacgcggaacatcaacctttgatggactttcaattgcctgggcagccgttgaatatcttcatgaagttaaccaatgtcgtgctattctcgccacgcattttcatgaaatgacagcactcactgaaaaacttgaccgcctttataacgtaacaatgaaagtcaaaaattgggatggcgatgtggttttccttcatgaagtcatgccaggagctgctgaccgatcctacggagtacaagttgcaaagcttgctggacttcccacagcagttattacacgtgctacagatgtcctgcatcaattagaacaaggcgaaacagctggaaaaggaaataaattaattgatgatttaccgcttttttcccttaaaacaacatctctcataaatgaagaaacaaacaaacattgcatgcttcatgaggctttaaaaaatatctatcctgacgagctctctccgaaagaagctttagaagtactttatcgcctaaaacaacttgaaaaaaaataa

SEQ ID NO: 4119 - protein, 911 aa, Bartonella quintana
MDNKTDHKNDLNSQPVPSSAPHKERLTPMMEQYIEIKAVNSDSLLFYRMGDFYELFFNDAIEAAQVLGITLTTRGKHLGEDIPMCGVPVHAADDYLQKLISSGYRVAVCEQTEDPAEAKKRGSKSIVRRDVVRLVTPGTITEEKLLDPTRANYLMTLARIKTSKGEEFALSWIDISTGIFRVTESHPEKLLADIMRVDPQEIIVADSFFHDKSHKSLFNVLDRIVSPQHVSLFDAVTAERDICSYFKLSTLEGVADYSRSELSAIAAAIRYIEKTQITHRPPLMRPERQNENATLFIDAATRLSLELIRTTSGQRDGSLLKAIDRTVTGGGSRLLVDRLIAPLTTPSAIDKRLDSIAFFLRNTSLAEAIQLILKGGPDMPRAVSRLALGRGGPRDIASIQRGFEIIHGLNQLLNNELLPQEISDVQQVFSHLPTALHFRLEQALSDDLPLLKRDGGFIRPNYHKELDEMRALRDESRLIIAELQAQYAKETDIKTLKIKHNNILGYFIEITNLQATALTNTPQAKARFIHRQTLANVMRFTTTELVELEGRIAHAATHAMTLELEIFDTLVHEITEQVDFIRKAAEALAILDVSVALARLAEEQEYCRPKIDQSLTFRITAGRHPVVEQALRKQAAEPFVANNCDLSVQKNHQYAAIWLLTGPNMGGKSTFLRQNALITIMAQMGSFVPASSAHIGVVDRLFSRVGASDDLARGRSTFMMEMVETATILNHASSHSLVILDEIGRGTSTFDGLSIAWAAVEYLHEVNQCRAILATHFHEMTALTEKLDRLYNVTMKVKNWDGDVVFLHEVMPGAADRSYGVQVAKLAGLPTAVITRATDVLHQLEQGETAGKGNKLIDDLPLFSLKTTSLINEETNKHCMLHEALKNIYPDELSPKEALEVLYRLKQLEKK

SEQ ID NO: 4120 - DNA, 2631 bp, Bordetella bronchiseptica
  CDS (1)..(2631): transl_table=11
atgtcgcaagttattgattctaaacatactcccatgatgcagcaatacctgcgcctcaaagccgaggccggaccgctgctgttgttctaccgcatgggcgacttctacgagatgttctatgaagacgccgaacgcgccgcgcgcctgctcaacctcacactgaccaagcgcggcaactcgaacggcacgccgatcccgatggcgggcattcccgtgcacgccatggagcaatacctggcgcgcctggtcgcgctgggcgaatcggtcgccatctgcgagcagatcggcgatcccgccgccgccaaggggccggtcgagcgccgcatcgtgcgcatcgtcacgcccggcaccctgaccgacgaagccttgctgccggccaaggccgaccgcgcgctggcggcggtctgcgtcacgggcaagcgcgaaccgcgcgccggcctggcctggctcaacctggccagcggcgccttccatgtcaccgagtgcgcgcccggccagctcgagtccgaactgcatcgcatcgcgccggccgaactgatccaggccgaaagcgccgagctgcacatggccttcgaaggcgcgcgcacgcgcgtgcccgattggcatttcgaagccgacggcgcgcgcgcccagttgctggcgcacttcaagaccgacagcctgggcggcttcgacgtcgaggacatgccggccgccgtgtgcgcggcgggcgccctgctgcgctacgccgcgcgcacccagtcgcaggcgctggcgcacgtgcagaccatcgcggccgaacgcccgggacaatatgtgctgctcgatccggtcacgcgccgcaacctcgaactgacccagaccctgagcggcgaggaatcgcccacgctgttctccctgctcgatggctgccgcacgcccatgggcagccggctgctgcgccgctggctgcaccaccccctgcgcgagaacgaaccggtgctggcccgccaacacgccatcgccaccatgctgaccgcgcgccaggaaggcgaacaggcctttgccgcggcggccttgctcgagacgctgcgcgatgcgctcaacgcctttcccgacatcgagcgcatcgccgcccgcgtggcgctgcgctcggtgcgcccgcgcgagctggccagcctgcgcgacgccctggtcgccctgcctgccctgcacgccagcctggcgcccctgtccggctcgccgcgcgcccgcgagctggccgcgcagctggccatgccgccggacatcggcgagctgctggcacgcgcggtcgccagcgagccggcggtggccatccgtgacggcggcgtcatcgccgccggcttcgacagcgaactggacgaactgcgcgcgctggccaccgacggcggcgatttcctcgtgcaactggaagcgcgggaacgcgaacgcaccggcatcggcaacctgcgcgtcgaattcaaccgcgtgcacggcttctacatcgaagtctccaagggccagaccgacaaggtgcccgaggactaccggcgccgccagaccctcaagaacgccgagcgctacatcacgcctgaactcaagacctgggaagaccgcgtcctgtcggcacaggaccgttcgctggcccgcgaaaaatggctgtacgagcaattgctcgacgcgctggcgcagtatgtgcgccccctgtcccagtgcgcgagcgccctggccgaactagacacgctggccgcgctggccgaacatgcccggcgtcacgactgggtcgcccccgagctgatcgacggcgccgagatcgacatcgaggcaggccgccatcccgtggtcgagcgcgccatcgaacgcttcacgcccaacggctgtcgcctggaccagacccgccgcatgctgttgatcaccggccccaacatgggcggtaaatcgacctatatgcgccaggtggccctgatcgccctgctggcgcgcaccggcagcttcgtgccggccacccgcgcgcgcgtcggccggctcgaccgcatcttcacccgcatcggcgcggccgacgacctggccggcgggcgctccaccttcatgatggagatgaccgaggcggccgccatcctggcggccagcacgccggccagcctggtgctgatggacgaaatcggccgcggcacgtccacctacgacggcctggcgctggcctgggccatcgcgtaccgcctcctgacgcacaaccgcgcgctcacgctgttcgccacccactacttcgagttgacccgcctgcccgccgaacagcccaccgcggccaacgtgcacctggccgcggccgagtcggccggcggcatcgtgttcctgcacgaagtgcgcgaaggcccggccagccgcagctacgggatccaggtcgcccagcgcgccggcgtacccgccgcggtcatccgccaggcctcgcgcgaactcgaacgccttgaagcccagggcgcgcccaccccgcagctgggcttgttcgccgcggcgctcgacgcggacgtgcaaagccaggccatgaccgagcaggccgaggatgccgccgcgctggcgcaactgcgcgaccagcttgcggccatcgaccccgacagcctgaccccgcgcgaagccctcgacgcgctataccgcctcaaacagcatctgacatga

SEQ ID NO: 4121 - protein, 876 aa, Bordetella bronchiseptica
MSQVIDSKHTPMMQQYLRLKAEAGPLLLFYRMGDFYEMFYEDAERAARLLNLTLTKRGNSNGTPIPMAGIPVHAMEQYLARLVALGESVAICEQIGDPAAAKGPVERRIVRIVTPGTLTDEALLPAKADRALAAVCVTGKREPRAGLAWLNLASGAFHVTECAPGQLESELHRIAPAELIQAESAELHMAFEGARTRVPDWHFEADGARAQLLAHFKTDSLGGFDVEDMPAAVCAAGALLRYAARTQSQALAHVQTIAAERPGQYVLLDPVTRRNLELTQTLSGEESPTLFSLLDGCRTPMGSRLLRRWLHHPLRENEPVLARQHAIATMLTARQEGEQAFAAAALLETLRDALNAFPDIERIAARVALRSVRPRELASLRDALVALPALHASLAPLSGSPRARELAAQLAMPPDIGELLARAVASEPAVAIRDGGVIAAGFDSELDELRALATDGGDFLVQLEARERERTGIGNLRVEFNRVHGFYIEVSKGQTDKVPEDYRRRQTLKNAERYITPELKTWEDRVLSAQDRSLAREKWLYEQLLDALAQYVRPLSQCASALAELDTLAALAEHARRHDWVAPELIDGAEIDIEAGRHPVVERAIERFTPNGCRLDQTRRMLLITGPNMGGKSTYMRQVALIALLARTGSFVPATRARVGRLDRIFTRIGAADDLAGGRSTFMMEMTEAAAILAASTPASLVLMDEIGRGTSTYDGLALAWAIAYRLLTHNRALTLFATHYFELTRLPAEQPTAANVHLAAAESAGGIVFLHEVREGPASRSYGIQVAQRAGVPAAVIRQASRELERLEAQGAPTPQLGLFAAALDADVQSQAMTEQAEDAAALAQLRDQLAAIDPDSLTPREALDALYRLKQHLT

SEQ ID NO: 4122 - DNA, 2589 bp, Borrelia burgdorferi
  CDS (1)..(2589): transl_table=11
atggaaaaaaatgttaccccaatgataaggcagtatttagatatcaagaaaaaatataaagatgctgttctttttttcagagtaggaagtttttatgaaatgttttttgatgatgcaattgaggtaagcaagcttcttaatttaacgttgacaaaaagagaaaatgttccaatgtgtggggttccttatcataccagtaaagaatatataaggaaattaattttatttgataaaaaggttgcaatttgtgaacaagcgtccaattctacttctggggggcctttagaaagagaggttgttgaggtaataaccccaggcgttattattgatgaagattttttaaatgatgatattaataactatttagttgctattagtgattataaagattattattcgttttcttatatagatttatctacttccagtcttggaataatgttttatgagaatggtttttttgaaaaacttaaaagggatcttgagaaatactctcctaaagagataatagtttctgaaaatttttattatgaatactcagagaagcttaatcttagtagatttttaattaacagagttcctacttggcatcttgataaggatattgcaataaaaacaataaaggagcattttaacatacttggattgagctctcttggatttgatgaggaaaagccctattacatttcaatttttcttattataaatcatataaaaaataatttaaaaaatttattaagtaatattgataaaatagatatcaataatgattcttcgtacatgtttcttgatgacgtaactcaagttaatcttgaacttgtaaaaaataataatgatttttcttctcaatattcattatattctgtgttaaatgattgcaaaactgcaatgggaaagagacttttaagagaatttattttaaatccaattttaaatatttctgagattaataccaggctagatcatgttgaatttttttgcaaaaatattagcttgactgtgactttaagagaaacttttattaatatatgggatattgagagaataatatctaggattcaaatgaaaagatatattaaaaaagattttttatttattgaaaaagctctttctgtattttttacggtaaaaaagttatttgacaagcataattttgattattggaattttgataaatttgaagaggatagtatttctaaagtttattttttgataaatagtgcaatttcaagtgcacctgatgaacttattaaaagaggttatgacttaaagcttgataacttaaaagatttaaagattaatgcaaataaatatattgatcaatatcttgaatcagagagattgcttagcaagattaataacctaaagattagaaaaactaataatagggggttattttttgaagttacaaagagtaattatgctcaagtgccaccacattttatggaaagccaagctttaaattcttcaaaaagatataaaacagaaaaacttatttctcttgaggtggatattaataatgctgaagataatgtggttgcttttgaacaggaaatttttgatgaaatagcatcaaatgttgttatgcataataaagttcttaaaaaggttgcagaattttttgcatatattgatttagttgttaactttggttatttggcaaaaaaaaatgaatataaaaggcctgtattgacatctggtaaagaaattcttcttgaaaagtctcggcatcctgttgttgagcactacactaaaaatactgaaatctttactgaaaattttgtaagaattaataaagaaaagtatttttgtttaattactggacctaatatggcaggtaaatcaacctatttgcgtcaggtggctttaattactttaatggcgcatataggctcttttgtgccagcttctaaagctttaataggtattacagataaaattttttgcaggattggagcaagtgataacattgccaaaggggaatccacttttttagttgaaatgaatgaaacagccaacattttaaggaatgcaacagaaaagagtttaataattatggatgaagttggaagaggtactagcacaaatgatgggcttgctattgcttattctattatagagtatattttagagtatattaaagctagaagtttgtttgccacacattttcatgaattgtcgtctattaatcatcaggcttttattaatctttcaatgaaaattgaaaagcagggcaacgatcttgttttcttaagagaagttgaagaaaagccatctcttaattcttatggtatttatgttgctcgcatagcaggacttcccttaagggtaatagatagagctaatgttattctagaaagtttggtgggccgagagggcaactcttgtttagagtttcttccccatgtttcttctgatggtaatgataaagagatcttgaaaaatgacactgatattcatattaaattaaatgagtatttagagttaaaaaattttatttctaacatagatattaataatattactccttttcaatcaattgagctgttaaatcaaattgttttaaaggttatttctcagtccagttag

SEQ ID NO: 4123 - protein, 862 aa, Borrelia burgdorferi
MEKNVTPMIRQYLDIKKKYKDAVLFFRVGSFYEMFFDDAIEVSKLLNLTLTKRENVPMCGVPYHTSKEYIRKLILFDKKVAICEQASNSTSGGPLEREVVEVITPGVIIDEDFLNDDINNYLVAISDYKDYYSFSYIDLSTSSLGIMFYENGFFEKLKRDLEKYSPKEIIVSENFYYEYSEKLNLSRFLINRVPTWHLDKDIAIKTIKEHFNILGLSSLGFDEEKPYYISIFLIINHIKNNLKNLLSNIDKIDINNDSSYMFLDDVTQVNLELVKNNNDFSSQYSLYSVLNDCKTAMGKRLLREFILNPILNISEINTRLDHVEFFCKNISLTVTLRETFINIWDIERIISRIQMKRYIKKDFLFIEKALSVFFTVKKLFDKHNFDYWNFDKFEEDSISKVYFLINSAISSAPDELIKRGYDLKLDNLKDLKINANKYIDQYLESERLLSKINNLKIRKTNNRGLFFEVTKSNYAQVPPHFMESQALNSSKRYKTEKLISLEVDINNAEDNVVAFEQEIFDEIASNVVMHNKVLKKVAEFFAYIDLVVNFGYLAKKNEYKRPVLTSGKEILLEKSRHPVVEHYTKNTEIFTENFVRINKEKYFCLITGPNMAGKSTYLRQVALITLMAHIGSFVPASKALIGITDKIFCRIGASDNIAKGESTFLVEMNETANILRNATEKSLIIMDEVGRGTSTNDGLAIAYSIIEYILEYIKARSLFATHFHELSSINHQAFINLSMKIEKQGNDLVFLREVEEKPSLNSYGIYVARIAGLPLRVIDRANVILESLVGREGNSCLEFLPHVSSDGNDKEILKNDTDIHIKLNEYLELKNFISNIDINNITPFQSIELLNQIVLKVISQSS

SEQ ID NO: 4124 - DNA, 2739 bp, Bradyrhizobium japonicum
  CDS (1)..(2739): transl_table=11
atgacgatgcaacagccgatacccgtaccgccgcccgacgaaacgcccgcgccgcaggcggaagccgccgcgcgcgtcacgccgatgatggaacagtacctggagatcaaggcggcgcatcagggcctgctgctgttctaccggatgggcgacttctacgaattgttcttcgaggacgccgagatcgcctccaagacgctcggcatcgtgctgaccaagcgcggcaagcaccagggcgcggacatcccgatgtgcggcgttccggtcgagcgcgccgaggattatctgcaccgcctgatctcggccggccaccgggtcgcggtctgcgagcagaccgaggatcccgccgccgcgaaagcgcgcggcaacaagagcgtggtgcgccgcggcgtggtgcggctggtcacgcccggcacgctgaccgaggacacgctgctcgatgcgcgcgccaacaattacctgctggcgatcgcgcgcgcccgctcgtccaccggcggcgaccgcttcgggctcgcatggatcgacatctcgaccgccgaattcatggtgacggaatgctcgggcggcgagctcgccgcaacgctggcgcggatcaatccgaacgaggcgatcgtcaccgacgcgctctacaatgacaacgagctcggacagaccttgcgcgaattgccggcggtgacgccgctgacccgcgacgtcttcgacggcgccaccgccgagaagcggctgtgcgactactttgccgtcgcgaccatggacgggctggcacagctgaccaggctcgaagcgacggccgcttccgccgccgtcacctatgtcgaccgcacccaggtcggcaggcacccgccactgtcaccgcccgcgcgcgaagcctcgggcgcgaccatggcgatcgatccggccacgcgcgccaatctcgagctgacgcggacgctcgccggcgagcgccgcggctccctgctcgatgcgatcgactgcaccgtgacctcggcgggctcgcgcctgctggcgcagcggctggcggcgccgctgacggatgcgccggcgatcgcgcggcggctcgacgcggtcggcgccttcgttgccgattccgccgcgcgcgaagacatccgcagcatcctgcgcggcgcgcccgacatgtcgcgggcgctggcccgtctctcggtcggccgcggcggaccgcgcgacctcgcgggcttgcgcgacggcatcatcgccgccgaccaggtgctggcgcggctcggcgaactcgaccagccgccgcaggagatcgcggcggtgatggcggccttgacgcgaccatcgcgcgagctcgcggccgagtttgcgacagcgctcgacgagcaactgccgctgatcaagcgcgacggcggcttcgtgcgccagggctatgagcccgcgctcgacgaagcccggaacctgcgcgacgcctcgcgcctcgtggtggcctcgatgcaggcgcgctacgccgacgacaccggcgtcaaaggcctcaagatccggcacaacaacgtgctcggctatttcgtcgaggtcaccgcgcagcatggcgacaagctgatgtcggcaccgctcaacgcgaccttcatccatcgccagacgcttgcgggccagatccgcttcacgacctccgagctcggcgagatcgaagccaagatcgccaatgccggcgaccgcgcgctcggcctcgagctcgagatctttgagcggctctgcgccaaggcgctcgagatcagcgacgacctgcgcgccgccgcgcaaggctttgcgctgctcgatgttgcgacttcgctggccaagcttgcagtcgacgagaactatgtgcggccggaagtggactcctcgctcggctttgcgatcgaagccggccgtcatcccgtcgtcgagcaggccctgaagcgcaacggcgagccgttcattgccaatgcctgcgatctctcgccggcgcccgcgcaaaagtccggccagctctggctgctgaccggtcccaacatggctggtaaatcgaccttcctgcgccagaacgcgctgatcgcactgctggcgcagatcggcagcttcgtgccggcgacgcgcgcccgcatcggcatcatcgatcgcctgttctcgcgcgtcggcgccgccgacgatctcgcgcgcggccgctccaccttcatggtggagatggtcgagaccgcggcgatcctgaaccaggccggcgagcgcgcgctcgtgatcctcgacgagatcggccgcggcacggcaaccttcgacggcctctcgatcgcctgggccgcgatcgagcatctgcacgagagcaaccgctgccgcacgctgttcgcgacgcattatcacgagctgaccgcgctctcggccaagctgccgcggatgttcaacgccaccgtgcgcgtcaaggagtggcagggcaatgtcgtgttcctgcacgaggtgctgccgggctcggccgaccgctcctacggcatccaggtggcaaaactcgcaggcctgccgccggccgtgatcacgcgcgccaaatccgtgctggcgaaactcgaggcgcaggatcgcggccagaccgcgcgggccctcgccgatgatctgccgttgttcgccgtgccctcacgcgccgccgcggaagccgcgccgccgagcgaggcggagctgctgatggacgcggtgaaggcgctgcaccccgacgagatgtctccgcgcgaagcgctcgatgcactgtatgcgttgaaggccaagctgccgaagcagtaa

SEQ ID NO: 4125 - protein, 912 aa, Bradyrhizobium japonicum
MTMQQPIPVPPPDETPAPQAEAAARVTPMMEQYLEIKAAHQGLLLFYRMGDFYELFFEDAEIASKTLGIVLTKRGKHQGADIPMCGVPVERAEDYLHRLISAGHRVAVCEQTEDPAAAKARGNKSVVRRGVVRLVTPGTLTEDTLLDARANNYLLAIARARSSTGGDRFGLAWIDISTAEFMVTECSGGELAATLARINPNEAIVTDALYNDNELGQTLRELPAVTPLTRDVFDGATAEKRLCDYFAVATMDGLAQLTRLEATAASAAVTYVDRTQVGRHPPLSPPAREASGATMAIDPATRANLELTRTLAGERRGSLLDAIDCTVTSAGSRLLAQRLAAPLTDAPAIARRLDAVGAFVADSAAREDIRSILRGAPDMSRALARLSVGRGGPRDLAGLRDGIIAADQVLARLGELDQPPQEIAAVMAALTRPSRELAAEFATALDEQLPLIKRDGGFVRQGYEPALDEARNLRDASRLVVASMQARYADDTGVKGLKIRHNNVLGYFVEVTAQHGDKLMSAPLNATFIHRQTLAGQIRFTTSELGEIEAKIANAGDRALGLELEIFERLCAKALEISDDLRAAAQGFALLDVATSLAKLAVDENYVRPEVDSSLGFAIEAGRHPVVEQALKRNGEPFIANACDLSPAPAQKSGQLWLLTGPNMAGKSTFLRQNALIALLAQIGSFVPATRARIGIIDRLFSRVGAADDLARGRSTFMVEMVETAAILNQAGERALVILDEIGRGTATFDGLSIAWAAIEHLHESNRCRTLFATHYHELTALSAKLPRMFNATVRVKEWQGNVVFLHEVLPGSADRSYGIQVAKLAGLPPAVITRAKSVLAKLEAQDRGQTARALADDLPLFAVPSRAAAEAAPPSEAELLMDAVKALHPDEMSPREALDALYALKAKLPKQ

SEQ ID NO: 4126 - DNA, 2751 bp, Bradyrhizobium sp
  CDS (1)..(2751): transl_table=11
ttggctagtttccgcgccatgacgatccagcagcccatctccgtcccggttccgcaggaggcgacgcctgccgaggcgccggccaagctcacaccgatgatggagcaatatctcgacatcaaggccgcgcatcccgggctgatgctgttctaccggatgggcgatttctacgagctgttcttcgaggacgccgaggtcgcatcaaaagcgctcggcatcgtcttgaccaagcgcggcaagcatcagggccaggacatcccgatgtgcggcgtgccggtggagcgctccgaggactatctgcaccggctgatcgcgcagggcatccgcgtcgccgtctgcgagcagatggaggatccggccgcggcgcgggcgcgcggcaacaagagcgtggtgaagcgcggcgtcgtgcgcgtggtgacgccgggtacgctcaccgaagacaatctgctcgacgcgcgcgccaacaactacctgctgtcgatcgcgcgcagccgcggctcgtcgggcggcgaccggctcgggcttgcctggatagacatctcgacctcggacttcatcgtcaccgaatgcgccttcgccgagctgacggcgacgctcgcgcggatcaatccgaacgaagtcatcgtctccgacgcgctgtactcggacgaggccttcgagccagtgctgcgcgagcttgccgcggtgacgccgctgacccgcgacgtattcgacggcgccaccgccgagcgccggctatgcgattatttcgccgtcgccaccatggacggtctcgcggtgctatcgcggctggaagccaccgcggcggccgcctgcgtcacttatgtcgagcgcacccaggtcggccagcgcccgccgctggcgccgccggcgcgcgaggcgaccggcagcaccatggcgatcgatccggccacccgcgccaatctcgaactgacgcggacgctcgccggagagcgccgcggctcgctgctcgacgcgatcgactgcacggtgacctcggccggctcgcgtctcctggcccagcgcctcgccgcgccgctgaccgagccggcgcagatcgggcgcaggcttgatgcggtcaacgcattcgttgccgacagtgccgcgcgcgaggatatccgcgtgatcctgcgcggcgcgccggacatgacccgcgcgatggcgcggctgtcggtcgggcgcggcgggccgcgcgatctcgcggcgttgcgcgacggcatcctcgccgccgaccaggcgctggcgcggctctccgtgctcgaccagccgccgcaggaaatcgcgtcggtgatggcggcgctggcgcggccggcgcgcgcgctggcggacgaattcgcccgcgcgctcgacgagcagctgccgctgatcaagcgcgacggcggcttcgtccggtcgggctatgatgcgacgctcgacgagacgcgcaatctgcgcgacgcctcgcgcctcgtcgtcgcctccatgcaggcgcgctatgccgaccagaccggcgtgaaggcgctcaagatccggcacaacaacgtgctcggctatttcgtcgaggtcaccgcgcagcacggcgacaagctgatgtcggcgccgctcaacgcgaccttcatccatcgccagacattggcgggacaggtgcgcttcaccacttcggagctcggcgagatcgaggcgaagatcgcgaacgccggcgagcgcgcgctcaatctcgagctcgagatcttcgaccgcctgtgcgcacaggcgctcgcgatcggcgacgatctgcgcgccgccgcgcatggctttgccatgctcgatgtcgccaccgccttggccaagctcgcgttggacgacaactacgtccgcccggaggtcgacggctcgctcggcttcgccatcgagggcggccgtcatcccgtggtggagcaatcgctgaagcgcgagggccagccgttcatcgccaattcctgcgacctgtcgccgacgccgggacacaagagcggccagctgtggctgctcaccggcccgaacatggcgggcaaatcgaccttcctgcgccagaacgcgctgatcgctctgctagctcagatcggcagcttcgtaccggcgagccgcgcccgcatcggcatcgtcgaccggctgttctcgcgcgtcggcgccgccgacgatctcgcgcgcggacgctcgaccttcatggtcgagatggtcgagactgcggcgatcctcaatcaggccggcgagcgcgcgctggtgatcctggatgagatcgggcgcggcacggcgacgttcgacggtctctcgatcgcctgggcggcgatcgagcacctgcacgagagcaaccgctgccgcacgctgttcgcgacgcactaccacgagctgaccgcgctcgccgccaagctgccgcggctgttcaacgccacggtgcgtgtcaaggaatggcagggcgatgtcgtgttcctgcacgaggtgctgcccggctccgccgaccgctcctacggcatccaggtggcgaagctcgccggcctgccgccggccgtgatcagccgcgccaaatcggtgttggcgaagctggaggccgccgaccgcggccagaacgcgcgggcgctggtcgatgacctcccgctgttcgcggtgccgtcgcgcgcggcggtggagcccgcgatgtcgaaggagacggaggaactgatcgccgcggtgaaggacctgcatccggacgagatgacgccgcgcgaagcgctggacgcgctgtaccggctgaaggcgaagttgccggccaaataa

SEQ ID NO: 4127 - protein, 916 aa, Bradyrhizobium sp
MASFRAMTIQQPISVPVPQEATPAEAPAKLTPMMEQYLDIKAAHPGLMLFYRMGDFYELFFEDAEVASKALGIVLTKRGKHQGQDIPMCGVPVERSEDYLHRLIAQGIRVAVCEQMEDPAAARARGNKSVVKRGVVRVVTPGTLTEDNLLDARANNYLLSIARSRGSSGGDRLGLAWIDISTSDFIVTECAFAELTATLARINPNEVIVSDALYSDEAFEPVLRELAAVTPLTRDVFDGATAERRLCDYFAVATMDGLAVLSRLEATAAAACVTYVERTQVGQRPPLAPPAREATGSTMAIDPATRANLELTRTLAGERRGSLLDAIDCTVTSAGSRLLAQRLAAPLTEPAQIGRRLDAVNAFVADSAAREDIRVILRGAPDMTRAMARLSVGRGGPRDLAALRDGILAADQALARLSVLDQPPQEIASVMAALARPARALADEFARALDEQLPLIKRDGGFVRSGYDATLDETRNLRDASRLVVASMQARYADQTGVKALKIRHNNVLGYFVEVTAQHGDKLMSAPLNATFIHRQTLAGQVRFTTSELGEIEAKIANAGERALNLELEIFDRLCAQALAIGDDLRAAAHGFAMLDVATALAKLALDDNYVRPEVDGSLGFAIEGGRHPVVEQSLKREGQPFIANSCDLSPTPGHKSGQLWLLTGPNMAGKSTFLRQNALIALLAQIGSFVPASRARIGIVDRLFSRVGAADDLARGRSTFMVEMVETAAILNQAGERALVILDEIGRGTATFDGLSIAWAAIEHLHESNRCRTLFATHYHELTALAAKLPRLFNATVRVKEWQGDVVFLHEVLPGSADRSYGIQVAKLAGLPPAVISRAKSVLAKLEAADRGQNARALVDDLPLFAVPSRAAVEPAMSKETEELIAAVKDLHPDEMTPREALDALYRLKAKLPAK

SEQ ID NO: 4128 - DNA, 2748 bp, Brucella melitensis; identical to SEQ ID NO: 3998
  CDS (16)..(2748): transl_table=11

SEQ ID NO: 4129 - protein, 910 aa, Brucella melitensis
MEAKVEEKEPEPVENAGPDAPVRLTPMMEQYIEIKAANVDSLLFYRMGDFYELFFDDAVAASAALGITLTKRGKHLGEDIPMCGVPVHAADDYLQKLIAKGYRVAVCEQVEDPAEAKKRGSKSVVKRDVIRLVTPGTLTEEKLLDPAQANFLMAMGRTRGDGALALAWIDISTGTFRVAETTPDRLFADIMRVDPRELVVADSAFHDEELRPVFDLIGKAVTPQPATLFDSAAAQTRIQHYFNVATLDGFGQFSRPELSAISGAIAYIEKTQISERPPLMRPEREHEGGTLFIDPATRASLELARTMSGNRDGSLLKAIDRTVTGGGARLLAERLTAPLTSPKEIALRLDSVSWCLSEQTLCEALRLELKGVPDMPRALSRLAVGRGGPRDLGALACGFEAAGGIASLLDGALLPDELAAAREAIEKMPAGFAAHLDRALADELPLLKRDGGFVREGYNSELDEMRALRDQSRRVIAGLQADYIEETGIKSLKIKHNNVLGYFIEVTANNSGAMTDTDEAKSRFIHRQTMANAMRFTTTELAELESKIANAADRALSIELAIFEELTAEAVAHADSIRAAASALSVFDVSTALAVLAEEQGYCRPHVDDSLSFNIVAGRHPVVEQALRRQAANPFVANDCDLSPQRDGGDGAIWLLTGPNMGGKSTFLRQNALIAILAQMGSFVPAGSAHIGVVDRLFSRVGASDDLARGRSTFMVEMVETAAILNQAGEHSLVILDEIGRGTATFDGLSIAWAAVEYLHEKNRCRALFATHFHEMTALSEKLERLSNVTMRVKEWDNDVIFLHEVAKGAADRSYGVQVARLAGLPEAVVNRARDVLHQLEAGETSGKADRLIDDLPLFSVMLQQEKPKPQIQAKDSELANAVAAISPDELTPREALDLIYKLKELAGKA

SEQ ID NO: 4130 - DNA, 2409 bp, Buchnera aphidicola subsp. Acyrthosiphon pisum
  CDS (1)..(2409): transl_table=11
atgaaaaaaaaaaatattaagaatagtatgaacaatcatactccaatgataaaacagtatttatctttaaaatcacagtatcctgatatgcttcttttttatcaaatgggtgatttttatgagttgttttacgaagatgcagaacgtatttcggaactactgaaaattactttaacaaaaaaaggatactcaaatcataagatcataccgatggctggagtcccatgccataaatcagaatattatttatctaaacttgtaaaattaggtgaatctattgcgatatgtgatcaacaaaaagaaactgattgtaaaaaaaaattaatttctcgtaaagtagttcgcataatcacgcctggaactgttacagatgaagtacttcttgaagaaaatgaagataattttatagctgctatctggaaagaaaataatcaatttggatactccgtattagatttatcattaggtttttttggtgtatctaagattttttcttcttgtgatttgctttcagaaattgaacgaactaatcctaaagaaatactctatccggaaaatttttcagatgtttttttaattgaaagtagaaagtgtattagaaaacgctcattattagaattcgatttagagacatcatataagttacttaatttgcaatataatacttgtagtttggatggatttggtatagagaaaaacaattttgtaatacgtgctgctggttgtttattacaatatgttaaatcaatgaatatgactctcttacctaatattcgtcagttaaaatataattacatggaagatagcatttttatgaattttagtacgcgtaaaagcttggaaattactcaaaatatttcaggagaaaaaaaaaatactttatctgcaatattaaataaaacagttacatctatgggtagtagaatgttaaatagatggttaaattctccactaaaaaactttaaaatagttagaaatcgtcatgaaagtgtggaagctttgcagtttttttataaagaattacaatttattttacgtcaagttaatgatttagaaagaatttattctcgtttagctttacgtactgcttcgcctcatgatttcgtacgaatgcgttctacattagaaatcttacctaatttacatttaatattaaaaaaaataaaatcaaaacatataaaaaaaatacgtttatctattggttattttgaagaagttttatgtttattaaaaaaagcaattagtttgaagccatctaaatgtattcgagatggtggtgtaatagcagaattatataatattgaacttgatgagttacgatctattaaaataaattccaaagaatatattaaaaattttgaacagaaagaaaaaaaaaaattaatgattgaatcatttaagataaaatttaataaaattatcgggtattatattcaaataagcaaacgtcatactcatttaattccaaaatattatgtcataatacaaacattaaaaaatacagaacgttatagtgttcctttattaaaagaatatgaagaaaaagttttaaattcagaaatgcgatctttattactagaaaaaaaattgtatgcagaaatttttaatattattgaaccttttttagaaaaattacaaaatagtgcattagcattgtcagaattagatgtgttagtaaatttatctgaacgtgctatatctctaaattatacgcgtcctattatgagcgaaaaatatggaatttctttactagaaagtcgtcatccagttgttgaatgttttttaaaaacaccatttataaaaaattctgtttttttatccagaacacaaagaatgatcattataacaggtcctaatatgggtggaaaaagtacatacatgcgtcaaattgcactcattgtaattatggccggtataggtagttttgttcctgctagatatgctttaattggttcgattgataaaatttttacaagaataggttctgcagatgacttaagcaatggatattcaacatttatgatggaaatgatggaaatatctaatattctacacaatgcaacatctaatagtttagttttaatcgatgaattaggaagaggaacttcaactaatgagggtttatctttagcttggtcgtgttctaggtatttaataaacataaataaatctatgacgttattatctactcattttgttgaattaacaaaattagaagaaaaagaaaaatttgtaaaaaattttcatttttctgctattaaaagcgatttacatatagcttttttatataaaattaaaaatggtatatcaaaaaaaagttatggtatatcagtagcttcattgtctggattgccagattctgttctagaagacgcagagaaaaaattaatagaaatagaaaatacataa

SEQ ID NO: 4131 - protein, 802 aa, Buchnera aphidicola subsp. Acyrthosiphon pisum
MKKKNIKNSMNNHTPMIKQYLSLKSQYPDMLLFYQMGDFYELFYEDAERISELLKITLTKKGYSNHKIIPMAGVPCHKSEYYLSKLVKLGESIAICDQQKETDCKKKLISRKVVRIITPGTVTDEVLLEENEDNFIAAIWKENNQFGYSVLDLSLGFFGVSKIFSSCDLLSEIERTNPKEILYPENFSDVFLIESRKCIRKRSLLEFDLETSYKLLNLQYNTCSLDGFGIEKNNFVIRAAGCLLQYVKSMNMTLLPNIRQLKYNYMEDSIFMNFSTRKSLEITQNISGEKKNTLSAILNKTVTSMGSRMLNRWLNSPLKNFKIVRNRHESVEALQFFYKELQFILRQVNDLERIYSRLALRTASPHDFVRMRSTLEILPNLHLILKKIKSKHIKKIRLSIGYFEEVLCLLKKAISLKPSKCIRDGGVIAELYNIELDELRSIKINSKEYIKNFEQKEKKKLMIESFKIKFNKIIGYYIQISKRHTHLIPKYYVIIQTLKNTERYSVPLLKEYEEKVLNSEMRSLLLEKKLYAEIFNIIEPFLEKLQNSALALSELDVLVNLSERAISLNYTRPIMSEKYGISLLESRHPVVECFLKTPFIKNSVFLSRTQRMIIITGPNMGGKSTYMRQIALIVIMAGIGSFVPARYALIGSIDKIFTRIGSADDLSNGYSTFMMEMMEISNILHNATSNSLVLIDELGRGTSTNEGLSLAWSCSRYLININKSMTLLSTHFVELTKLEEKEKFVKNFHFSAIKSDLHIAFLYKIKNGISKKSYGISVASLSGLPDSVLEDAEKKLIEIENT

SEQ ID NO: 4132 - DNA, 2418 bp, Buchnera aphidicola subsp. Schizaphis graminum
  CDS (1)..(2418): transl_table=11
atgactgaaactaatttttctactaaaaatagtaatcatactccaatgatcaaacagtatttatctttaaaatcacaatatcctaatatgcttcttttttatcaaatgggtgatttttatgaattattttacgaagatgccaaacgcgtttctagattattaaaaattactttaaccaaaaaaggcaattcaaataacaatattattcctatggctggagtgccatgtcatactgcagagtattatctctctaaacttgtaaaaatgggagaatctattgcagtatgtgatcaaataaaagatgtttattctgaaaaaaaattgctaactcgtcaagtagttcgagttattactcctggtactattacagatgaagcatttcttgaagaaaacaaagataattttattgcagcggtttggaaagaaaataataaatttgcatatgctattttagatatttctttgggattttttggtgtttctgaacatttcgatagaaattctttattatcagaaattgaacgtacaaatcctacagaattattatatcctgaaaatttcgaagatatgttattgatatctcataagaaatgcatacaaaaacgtccattattagattttgatataaaaatttcatataagttactaactttacagtttaaaacctctaatttgaatggatttggtattaagaaaaatcattttgttattcgccctgctggttgtttaattaattatatcaaattgatgcatatatcatttttacctcatattcgtaaaatacaatttaattatatagaaaataatatttttatgaattcgagtacacgtaaaagccttgaaatcattgaaagtatttctggtgaaagtaaaaatactctatcttcagtattaaataaaacagtcacatctatgggtggaagattattaaatcgctggttaaatactccttcaaaagatttaagtttaattaaaaatcgtcatggaatggtaaaacttttacgacctttttataaagaaatacaatgtattcttcgtcaagtgagtgatctcgaaagaatatgttcacgtttagctttacgtactgccttaccccgtgattttgtccgaatgcgttcgacattaaatattttacctgatttatgtttaatattaaaaaaaataaaatcgactagcattaataatgttctcatgtctattggaaaatttgaaaaaatattatttttgctgaaaaaatcgataaatttaacagttccttcttctattcgagatggaggtgtaatagcatgtaattataataaaaaacttgatgaattacgctctttaaaaaaaaattctcaaaaatatttacaagactttgaagtaaaagaaaaaagtagattaaatattgattcatttaaaatcggatacaacaatatcgtcggttattatattcaagttaacaaacgtcattctcatttaattccgcattcttatcttaagatacaaactttaaaaaatgtagaacgatatagtgttcctctattaaaaaattatgaaaaacaagttattagtgctaaatttcaagctatttttttagaaaaaacgctatatatggaattatttgatataatcgaaccgtttttagaagacttaaaaaatagtgcatttgcattgtcggaattagatgttttagtcaatttatctgaacgttctatatctttaaattatgtttgtcctaaaatgactaaaaaatatggtattaccttggtagaaagtcgtcatccagttgttgaatgttttttagaaaatccctttattagtaattctgttgatttatcaaaaaaaaatagaatgcttattattacaggccctaatatgggtggtaaaagtacttatatgcgtcaagttgcacttattattattatggcttgtataggtagttttgtacctgcaaagtatgcttctattggtttgattgataaaatttttacacgtattggttctgcagatgatgttagtaatggttattcaactttcatgatggaaatgacagaaatatctaatattcttcataatgcaacttgcaatagtttaattttaatagatgaattaggacgaggaacatcaaataaagatggattagcattagcttggtcatgttctaaatatttaatgactaaaaataaatctatgattttattatcgactcattttattgaattaacaaaattagaaaatttttttaaaaatataaaaaatttttatttttctgcttttgaacatgattcaaatatagcttttttatataaaattaaaaaaggaatttcaaaaaaaagttacggtatagcagtagcttctttatctgggattccagatattgtaatacaagatgcaaaaaagaaattaattgaattagaaagtgataatgttttttaa

SEQ ID NO: 4133 - protein, 805 aa, Buchnera aphidicola subsp. Schizaphis graminum
MTETNFSTKNSNHTPMIKQYLSLKSQYPNMLLFYQMGDFYELFYEDAKRVSRLLKITLTKKGNSNNNIIPMAGVPCHTAEYYLSKLVKMGESIAVCDQIKDVYSEKKLLTRQVVRVITPGTITDEAFLEENKDNFIAAVWKENNKFAYAILDISLGFFGVSEHFDRNSLLSEIERTNPTELLYPENFEDMLLISHKKCIQKRPLLDFDIKISYKLLTLQFKTSNLNGFGIKKNHFVIRPAGCLINYIKLMHISFLPHIRKIQFNYIENNIFMNSSTRKSLEIIESISGESKNTLSSVLNKTVTSMGGRLLNRWLNTPSKDLSLIKNRHGMVKLLRPFYKEIQCILRQVSDLERICSRLALRTALPRDFVRMRSTLNILPDLCLILKKIKSTSINNVLMSIGKFEKILFLLKKSINLTVPSSIRDGGVIACNYNKKLDELRSLKKNSQKYLQDFEVKEKSRLNIDSFKIGYNNIVGYYIQVNKRHSHLIPHSYLKIQTLKNVERYSVPLLKNYEKQVISAKFQAIFLEKTLYMELFDIIEPFLEDLKNSAFALSELDVLVNLSERSISLNYVCPKMTKKYGITLVESRHPVVECFLENPFISNSVDLSKKNRMLIITGPNMGGKSTYMRQVALIIIMACIGSFVPAKYASIGLIDKIFTRIGSADDVSNGYSTFMMEMTEISNILHNATCNSLILIDELGRGTSNKDGLALAWSCSKYLMTKNKSMILLSTHFIELTKLENFFKNIKNFYFSAFEHDSNIAFLYKIKKGISKKSYGIAVASLSGIPDIVIQDAKKKLIELESDNVF

SEQ ID NO: 4134 - DNA, 2673 bp, Burkholderia pseudomallei
  CDS (1)..(2673): transl_table=11
atggccacccaaatcgacgcctcctccgaagcagcagcggctacggccgccgcgcagcacacgccgatgatgcagcagtacctacgcatcaagtcggagcaccccgacacgctcgtgttctaccggatgggcgacttctacgagctcttcttcgaagacgcggaaaaagccgcgcgtctgctcgacctgacgctcacgcaacgcggcgcatccgccggcacgccgatcaagatggcgggcgtgccgcatcacgcggtcgagcaatacctcgcgaagctcgtgaaattcggcgaatcggcggcgatctgcgaacagatcggcgaccccgcgacgtcgaaaggccccgtcgagcgcaaggtcgtgcgcgtcgtgacgccgggcacgctgaccgacgccgcgctgctgtccgacaagagcgacgtgtttctgctcgcgctgtgcgtcggccacaacaaacgcggcgtcgcgtcgaacatcggcctcgcctggctcaatctcgcgagcggcgcgctgcggctcgccgagctcgcgccggatcagctcggcgcggcgctcgagcgcatccggcccgccgagattctcgcggccgacggcacgatcgaatcggtgccggccggcatgggcgcgatcacgcgcgtgcccgcgtggcacttcgatatcgcgtcgggcacgcagcgcctctgcgatcagctcgaagtcgcgagcctcgacggcttcggcgcgcaagcactcacgagcgcgaacggcgcggcgggcgcgctgctgatctacgcagcggccacgcagggccagcagcttcgccacgtgcgcagcctcaaggtcgaaaacgaatccgaatacatcgggctcgatccgtcgacgcggcgcaatctcgagctcaccgagacgctgcgcggcaccgaatcgccgacgctctattcgctgctcgacacctgctgcaccgcgatgggcagccgcctgttgcgccattggctgcatcatccgccgcgcgcgtcggtcgccgcgcaggcgcgccatcaggcaatcggcgcgctgctcgacgcccccccgaacgccggcctcgacagcctgcgctcggcgctgcggcaaatcgccgacgtcgagcggatcaccggccgcctcgcgctgctatccgcgcggccacgcgatctgtccagcctgcgcgacacgttcgccgccctgcccgcgctgcgcgagcgcgttgccgagatcgcatcgaacgcggccgcgctcggccgcctcgaagccgcgctcgagccgccgcccggttgcctcgatctgctcacgcgcgccatcgcggccgagccggcggcgatggtgcgcgacggcggcgtgatcgcccgaggctacgacgccgagctcgacgagttgcgcgacatttcggagaactgcggccagttcctgatcgatctcgaaacgcgcgagcgcgcacgcaccggcatttcgaacctgcgcgtcgagtacaacaaggtccacggtttctatatcgaagtcacgcgcggccagaccgacaaggtgcccgacgactaccgccgccgccagacgctcaagaacgccgagcgctacatcacgcccgagctgaagacgttcgaggacaaggcgctgtccgcgcaggaacgcgcgctcgctcgcgaacgcgcgctgtacgacggcgtgctgcaagcgctcctgccccatatcgagggttgccagcgcgtcgcaagcggcctcgccgaactcgatctgctcgcggcgttcgccgagcgcgcccgcacgctcgactgggtggcgccggaattcaccgacgagatcggcatcgaaatcgatcagggccgccatccggtcgtcgaggcacaggtcgagcaattcatcgcgaacgattgcgccctgaaccccgagcgaaagctgctcctcatcaccggcccgaacatgggcggtaaatcgacgttcatgcgtcagaccgcgctcatcgcgctgatggcgtacgtcggcagctacgtgccggcgaaagccgcgcgcttcggccccatcgaccgcatcttcacgcgcatcggcgcggcggacgacctcgcgggcggccgctcgacgttcatggtcgaaatgacggaggccgccgcgatcctgaacgacgcaacgccgcacagcctcgtgctgatggacgaaatcggccgcggcacatcgacgttcgacggcctcgcgctcgcctgggcgatcgcacgccatctgctgtcgcacaaccgctgctacacgctgttcgcgacgcactacttcgagctcacgcaactgccggcggaattcccgcaggcggcgaacgtgcatctgtccgccgtcgagcacggtcacggcatcgtattcctgcatgcggtcgaggaagggccggcgaatcagagctacggcctgcaggtcgcgcagttggcaggggttcccgcgccggtgattcgcgccgcgcgcaagcatctcgcgcacctcgaacagcagtccgccgcccaggcgacgccgcagctcgatctcttcgccgcaccaccggtcgtcgacgagccggaatgcaacgagccccccgccgcgacgccgcaccccgcgctcgagcgcctgctcgagctcgatccggacgacttgaaaccgcgcgacgcgctcgatctgctttacgaacttcacacactcgcccgctcgggcccggcggatgcgcaacgctga

SEQ ID NO: 4135 - protein, 890 aa, Burkholderia pseudomallei
MATQIDASSEAAAATAAAQHTPMMQQYLRIKSEHPDTLVFYRMGDFYELFFEDAEKAARLLDLTLTQRGASAGTPIKMAGVPHHAVEQYLAKLVKFGESAAICEQIGDPATSKGPVERKVVRVVTPGTLTDAALLSDKSDVFLLALCVGHNKRGVASNIGLAWLNLASGALRLAELAPDQLGAALERIRPAEILAADGTIESVPAGMGAITRVPAWHFDIASGTQRLCDQLEVASLDGFGAQALTSANGAAGALLIYAAATQGQQLRHVRSLKVENESEYIGLDPSTRRNLELTETLRGTESPTLYSLLDTCCTAMGSRLLRHWLHHPPRASVAAQARHQAIGALLDAPPNAGLDSLRSALRQIADVERITGRLALLSARPRDLSSLRDTFAALPALRERVAEIASNAAALGRLEAALEPPPGCLDLLTRAIAAEPAAMVRDGGVIARGYDAELDELRDISENCGQFLIDLETRERARTGISNLRVEYNKVHGFYIEVTRGQTDKVPDDYRRRQTLKNAERYITPELKTFEDKALSAQERALARERALYDGVLQALLPHIEGCQRVASGLAELDLLAAFAERARTLDWVAPEFTDEIGIEIDQGRHPVVEAQVEQFIANDCALNPERKLLLITGPNMGGKSTFMRQTALIALMAYVGSYVPAKAARFGPIDRIFTRIGAADDLAGGRSTFMVEMTEAAAILNDATPHSLVLMDEIGRGTSTFDGLALAWAIARHLLSHNRCYTLFATHYFELTQLPAEFPQAANVHLSAVEHGHGIVFLHAVEEGPANQSYGLQVAQLAGVPAPVIRAARKHLAHLEQQSAAQATPQLDLFAAPPVVDEPECNEPPAATPHPALERLLELDPDDLKPRDALDLLYELHTLARSGPADAQR

SEQ ID NO: 4136 - DNA, 2685 bp, Burkholderia xenovorans
  CDS (1)..(2685): transl_table=11
atgggcattcaaaccgcaacggccagcgacgtcgcacaacacacccctatgatgcagcagtacctacgcatcaaggcggagcatcccggcacgctggtgttctaccggatgggcgacttctacgaactctttttcgaagacgcggaaaaagccgcgcgcctgctcgatctgacactcacgcagcgcggcgcgtccgcgggcaatccgatcaaaatggccggcgtgccgcatcacgctgtcgaacaatatctggccaagctggtcaagctcggcgagtctgttgcgatttgcgagcagatcggcgacccggcaacgtcgaagggtccggtcgagcgcaaagtggtccgcgtggtcacgccgggcacgctcacggacgccgcgctgctgtccgacaagaacgacgtctacctgctggccatgtgcgtcgcgcacaatcgtcgcggtgtcgcgaccagcgtcggtctcgcatggctgaatctggcgagcggcgcgttgcgcctcgccgaactcgcgccggaccaggtggcggccgcgctcgaacgcattcgtcccgcggaagttctggtggccgacacgcccggcgacgccgcaagctggacgccgccggtcaacgcaggcgccctcacccgcgtgccggtctggcacttcgacatcgcctcgggcacgcagcgcttgtgcgatcagctggaagtggccggcctcgacggcttcggcgcgcattcgctgacctgcgcatggggcgcggccggcgcgctgctgctgtacgccgccgccacgcaaggccagcaattgcgtcatgtgcgcagcctgaaagtcgagtacgaatccgaatacatcggcctcgaccctgccacgcgccgcaatctcgaactcacggaaacgctgcgcggcacggagtcgcccacgctgtgttcgctgctcgacacctgctgcacgacaatgggcagccgtctgctgcgccactggctgcatcatccgccgcgcgaatcggcggtcgcgcaggcgcgtcagcaggcaatcggcgctttgctcgaggcaccgcctggcgcgggcgtcgactcgctgcgcggcgcgttgcggcagatctcggacatcgagcggatcaccgggcgcctcgcgctgctgtcggcacggcctcgcgatctgtcgagtttgcgcgacaccttcatcgcgttgcccgagttgcgcgcgcagctcgcggccgtttcgccgaatgcggattcgctagcccgcatcgacgcctcgctcgaaccgccgcaagcctgcgtcgaactgctcaggcgcgcggtcgccgaggagccgtcggcgatggtgcgcgacggcggcgtgatcgcgcgcggctacgacgcggaactggacgagttgcgggatatttcggagaactgcgggcagttcctgatcgacctcgaaacccgcgagcgcgcacgcacgggcatcggcaatctgcgcgtcgagtacaacaaggtgcatggcttctatatcgaagtcacgcgcggccagaccgacaaggtgccggacgactatcgccgccgccagacgctgaagaacgccgaacgctacatcacgccggaactgaaaacgttcgaggacaaagcgctgtccgcgcaggaacgcgcgctcgcccgcgaacgctcgctctacgacgcgttgctgcaggcgctgctgccctttatcccggattgccagcgggtcgcctcggcgcttgccgaactcgatctgctggcggccttcggcgagcgcgcccgcgcgctcgattgggtcgcgcccacgttctcgccggacgccggcatcgagatcgaacagggacggcatccggtcgtggaagcgcaggtcgagcagttcatcgccaacgactgctcgcttacgcccgagcgcaaactgctgctgatcaccggcccgaacatgggcggtaaatccaccttcatgcggcagaccgcgctgatcgcgctgctcgcctacgtgggcagctatgtgcccgcgcggcgcgccgccttcgggccgatcgaccgtatcttcacgcgtatcggcgcagcggacgaccttgccggcggccgctccaccttcatggtcgagatgaccgaagccgccgcgatcctgaacgacgccacgccgcaaagtctcgtgctgatggacgagatcggccgcggcacgtccaccttcgacgggctcgcgctggcgtgggcgatcgcgcggcatctgcttgcgcacaacggctgccatacgctctttgccacccactacttcgaactgacgcaactgccggcagagtttccgcaggcggccaacgtccacctgtcggcggtcgagcatgggcacggcatcgtgttcctccacgccgtcagcgaagggccggccaatcagagctacggcctgcaggtcgcgcaactcgccggcgtgccgaacgcagtgattcgcgcggcgcgcaagcatcttgcgtatctcgaacagcagtcggccgcgcagcccgcgccgcaactcgatctgttcgccgcgcccatgccgatgctgctcgaagacgcggacgacgagcgtgattcgaaagccgaagcgcttgtgccgcccgccatgcaggcgcttgtcgagcgtctgcgcggcatcgatccgaacgatctgcggccgcgcgaagcgctcgatctgctgtacgaattgcatgaactggccgccgcgccggatgcggatcattga

SEQ ID NO: 4137 - protein, 894 aa, Burkholderia xenovorans
MGIQTATASDVAQHTPMMQQYLRIKAEHPGTLVFYRMGDFYELFFEDAEKAARLLDLTLTQRGASAGNPIKMAGVPHHAVEQYLAKLVKLGESVAICEQIGDPATSKGPVERKVVRVVTPGTLTDAALLSDKNDVYLLAMCVAHNRRGVATSVGLAWLNLASGALRLAELAPDQVAAALERIRPAEVLVADTPGDAASWTPPVNAGALTRVPVWHFDIASGTQRLCDQLEVAGLDGFGAHSLTCAWGAAGALLLYAAATQGQQLRHVRSLKVEYESEYIGLDPATRRNLELTETLRGTESPTLCSLLDTCCTTMGSRLLRHWLHHPPRESAVAQARQQAIGALLEAPPGAGVDSLRGALRQISDIERITGRLALLSARPRDLSSLRDTFIALPELRAQLAAVSPNADSLARIDASLEPPQACVELLRRAVAEEPSAMVRDGGVIARGYDAELDELRDISENCGQFLIDLETRERARTGIGNLRVEYNKVHGFYIEVTRGQTDKVPDDYRRRQTLKNAERYITPELKTFEDKALSAQERALARERSLYDALLQALLPFIPDCQRVASALAELDLLAAFGERARALDWVAPTFSPDAGIEIEQGRHPVVEAQVEQFIANDCSLTPERKLLLITGPNMGGKSTFMRQTALIALLAYVGSYVPARRAAFGPIDRIFTRIGAADDLAGGRSTFMVEMTEAAAILNDATPQSLVLMDEIGRGTSTFDGLALAWAIARHLLAHNGCHTLFATHYFELTQLPAEFPQAANVHLSAVEHGHGIVFLHAVSEGPANQSYGLQVAQLAGVPNAVIRAARKHLAYLEQQSAAQPAPQLDLFAAPMPMLLEDADDERDSKAEALVPPAMQALVERLRGIDPNDLRPREALDLLYELHELAAAPDADH

SEQ ID NO: 4138 - DNA, 2526 bp, Carboxydothermus hydrogenoformans
  CDS (1)..(2526): transl_table=11
atgagctttacgccgatgatgaagcaatatcttgacattaaaaagcaatacagcgactgtcttttattttttcgtttgggagatttttacgaacttttttttgaagatgcggtaattgcttcccgggagctggaaattgttttaaccggccgggatgctggacaggaagaaagggtacccatgtgtggggttccctatcattcggctcagggctatattgccaagcttttatcccggggatataaagtagcaatttgtgaacaggtggaagatccgaaaaaagccaagggactggtgaagcgggaagttaccaaaatatatactcccggaacggttaccgaagagttttttttgcaagagaagaccaataattatattattgccctggcagaaaaagatgggttaattgccctggcggttgcggaagtttctacaggatatttgggaataacgtctgttgatgaaggtaaaatagaagtcttggcaagcgaaattcgccggttggcacccactgaagcggtggtattaaaaaattttaaaaataattttctgttaaaagatattaccggtattgttaattacttggaaaaattgccggcggaagaaattgaaattgcttttaaaggtcctgaagcgtcaaaagaagcttataaaattttaattagttatttaaaaagaattgaaccagcggttttaagtatctttgggcaaccggagttttatcaaattgatagttatttatattttgatgaaagtactcggaaaaatttggaaattttacgaaaccgtgaagacaattcttcttctttattgggaattattgattttacccagaccgctatgggcgctcgaaaattaaaggaagagctcacaaaaccgttgttaaatttaaaagcaattgctgaccgcttggatgctgtggaaattttggtaaatgattatgaattgagagaaaacttacgggagaacctgaagaatttatatgacttagaaagactttccattaaattagtttgcggaacaataaatccaaaagatttaattaaaatcaaacaatctcttccccaaatatggcatattaaaaacagcattaaccatgtaaaaaataagtcagttttatttgccgaaatttataaaaatcttccagaaatgcgtgaggtttataatttaattgataaaagtatagttgatgaccctccagtctcaccaaaagacggcggtattataaaaaacggatataatccaaccgttgacgagtaccggaaagcccgggaggaagggcaggattggataattaattacgaaaagaaagaaagggaaagaacgggaataaagtcattgaaagttaattacaataaagtttttggctattttatcgaagtaacgaaagctaacttgcacttagtacccgctgattatcaaagaaagcaaacaatggttaatgccgaaaggtttattactgaagaattaaaacattatgaaaaccttattttaggtgcaagtgaaaagcttgccaatttggaatatgagcttttttgtgaaatccgctcggaaattttaaaatatcaggaagatttaaaaagagctgcaagtgctgttgcgcttttggattttttaatttccctggcggtggccgcaattgagtatgactttacgcgaccggtcattaccgctgaaccggttttggaaataaaaaatggccgccatccggtggttgaaaagagtgttggccgggccaattttgttcccaatgatttataccttgacaccaaggaaaattcgcttcttttaattacgggccccaatatggccggtaaaagtacttacatgcgacaggctgctttaattgtaattttggcacagattggtagctttgttcctgcggaatatgccagggttggattggtggataaaatcctaacccgaattggtgccaccgatgatctggccaaaggacaaagtacttttatggtagaaatgattgaatgtaataatattttaagaaatgcaacatcccggagtttaattttgttagatgaagttggtagaggaacatctacctatgacggtataagtattgcggaagcaattattgaatatattcaaaaaaaaatcaaagcaaggacgcttttttcaacccattaccacgaattaacgggcttagaaggggaaattcctggagtcaaaaattttacggtcctggttcaggaaaaaggagaagaagttaagtttctccataaagttgtgcccggcaaaaccgataaaagttacgggatctatgtagcaaagcttgctggcttaccgcgggaagtggtggaaagggcctatgaaatattagcaaggttcgaggataaggggctaaaagttaaagatacagtaccggttcagttatcgctttttgaggaaaagccagagccttcgggtgtaataaaagaattaattgaattagacctgattcgtatgacaccgttggaggctttaaataaattatatgaactacggcaaaaagctttgggggaaaaataa

SEQ ID NO: 4139 - protein, 841 aa, Carboxydothermus hydrogenoformans
MSFTPMMKQYLDIKKQYSDCLLFFRLGDFYELFFEDAVIASRELEIVLTGRDAGQEERVPMCGVPYHSAQGYIAKLLSRGYKVAICEQVEDPKKAKGLVKREVTKIYTPGTVTEEFFLQEKTNNYIIALAEKDGLIALAVAEVSTGYLGITSVDEGKIEVLASEIRRLAPTEAVVLKNFKNNFLLKDITGIVNYLEKLPAEEIEIAFKGPEASKEAYKILISYLKRIEPAVLSIFGQPEFYQIDSYLYFDESTRKNLEILRNREDNSSSLLGIIDFTQTAMGARKLKEELTKPLLNLKAIADRLDAVEILVNDYELRENLRENLKNLYDLERLSIKLVCGTINPKDLIKIKQSLPQIWHIKNSINHVKNKSVLFAEIYKNLPEMREVYNLIDKSIVDDPPVSPKDGGIIKNGYNPTVDEYRKAREEGQDWIINYEKKERERTGIKSLKVNYNKVFGYFIEVTKANLHLVPADYQRKQTMVNAERFITEELKHYENLILGASEKLANLEYELFCEIRSEILKYQEDLKRAASAVALLDFLISLAVAAIEYDFTRPVITAEPVLEIKNGRHPVVEKSVGRANFVPNDLYLDTKENSLLLITGPNMAGKSTYMRQAALIVILAQIGSFVPAEYARVGLVDKILTRIGATDDLAKGQSTFMVEMIECNNILRNATSRSLILLDEVGRGTSTYDGISIAEAIIEYIQKKIKARTLFSTHYHELTGLEGEIPGVKNFTVLVQEKGEEVKFLHKVVPGKTDKSYGIYVAKLAGLPREVVERAYEILARFEDKGLKVKDTVPVQLSLFEEKPEPSGVIKELIELDLIRMTPLEALNKLYELRQKALGEK

SEQ ID NO: 4140 - DNA, 2637 bp, Chlorobium tepidum
  CDS (1)..(2637): transl_table=11
atggcaaaaagcgctcagggccgcacaaaagaaccgacaccgatgatgcgccagtatctcgaggtcaaggagcgttatcctggctatctgctgctattccgcgtgggggatttctacgaaacgtttcttgacgacgccgttacggtctcctcggctctgaatatcgtcttgacccggcgctcgaatggcggggctggcgagattccgctggccgggttcccgcatcacgccagcgaggggtacatcgccaagttggtgacgaaggggttcaaggtggccgtgtgcgaccaggtggaagacccggcgctggccaaggggatcgtcaaacgcgagatcaccgacatcgtcacgccgggcatcacctatagcgacaagattctcgacgaccggcacaacaactatctttgtgccgttgcgccggtgaagcgcgggcgcgagcacatggcgggcgtggcatttgtggacgtgaccactgccgagtttcgcatgacagaactgccgcttggcgagctgaaggattttctccagtcgcttcgcccgtcggagattctgatctcttcgcgtgacaaggagcttcgcgaatccctcgccaaaagtcttttcagcggcgcgctcttcacgacgctcgacgagtggatgtttaccgaagaacaggcggcgagggtgctggaaaaccatttcaagactcattcgctcaagggtttcggcatcgaagggtacgaggccggacggatcgcagcgggcgttattctccagtacctcgaagaggcgaagcaggggagcctgaagtacctcgtgcggatcggtcttgtcgaaagcggcgagaccatgacgctcgacatccagacgtgtcggaatctcgaaatcatctcctcgatgcaggatggttcgctgaacggaagcctgctcgaagtgatcgaccggacgaaaaacccgatgggggcgcggctgctccggcgctggctcttgcatccgctccggaagctggagccggtggtgcggcggcacgacgcggttggggagctgctcgacgcaccggagatgcgtgagggaattcgcgggatgctcggtggaatcatcgatctggagcgtgcgctggcccgcatcgctacatcgcgggcgatgccgagggaggtgcgccagctcggctcgtcgctcgcgatgattccacagctcaaatcgctgctcgagggcagcaagtcgctccggttgcgcgaactggccctgcggctcgatccgctgccggagctggccgaaaccatcgagaaggcgctcgatgccgaggcaagcggcacgttgcgcgacggcggctacatccgagccgggtatcacgcggagctggacgaactgcgggcgatctcgtccggggcgcgtgaccggcttctcgaaatccagcagcaggagaggcagcgcacctcgatttccacgctcaaggtgcagtacaacaaggtgttcggctactacatcgaggtgagtcgcgccaacagcgacaaggttccagagtattatgaaaagaagcagacgctggtcaacgctgaacgctacacgattccggcgctgaaggagtatgaggagaaaatcctgaccgccgaggagaaaagccagttgctcgagcaccagctctttcaagagctgtgtgcgatgattgccgagcaggcggcctcgatccagaccaccgccgccgcgcttgccgaactcgactgcctcgcctgcttcgcgagctgcgccgacgagttcggctactgccgtccggtgatgaacgagggcacggagttgtcgatcagggcgggccgccaccccgtgctcgaacgcattctcggcgcggacgaaccgtacgtcgccaacgactgccaggtcggttctgaacagcagttgctcatcatcaccggcccgaacatggccggtaaaagctcgtacctgcggcaggtaggccttgtggtgttgctcgcgcaggtgggttgtttcgtgcccgccgagtctgccgagatcggcctcgttgaccgcattttcacccgcgtcggcgcgtcggataacctcacctccggcgagagcaccttccttgtcgagatgaacgaggcggcgagcatcctcaacaacgccaccgagcgcagcctgctgctgctcgacgagatcgggcgcggcaccagcaccttcgacggcatgtccatcgcctggtcgatgtgcgagtacatccacgaccagcttcgctcccgcacgctctttgccacgcactaccacgagctggccgagctggagagccgcttcgagcggatcgtcaacttcaacgccacggtggtcgagaccgccgacacggtgatctttctgcgcaagatcgtgcgcggcgcgtcggacaacagctacggcatcgaggtggccaaaatggccggaatgccgccggaggtgatcgagcgggcgcgggagattctggccggcatggagcggcgcgaggttgaggtgccggtgcagcgccaagctctgccgctccgggtcgagtcgcgacagatttcgcttttcgaggaggaagagagccgcctgcgcaaagcgctctccggcatcgacatcaaccgcctcacgccgcttgacgcgctgatggagctgaagcgcttgcaagagatcgcgctcggcaaaggagcgtga

SEQ ID NO: 4141 - protein, 878 aa, Chlorobium tepidum
MAKSAQGRTKEPTPMMRQYLEVKERYPGYLLLFRVGDFYETFLDDAVTVSSALNIVLTRRSNGGAGEIPLAGFPHHASEGYIAKLVTKGFKVAVCDQVEDPALAKGIVKREITDIVTPGITYSDKILDDRHNNYLCAVAPVKRGREHMAGVAFVDVTTAEFRMTELPLGELKDFLQSLRPSEILISSRDKELRESLAKSLFSGALFTTLDEWMFTEEQAARVLENHFKTHSLKGFGIEGYEAGRIAAGVILQYLEEAKQGSLKYLVRIGLVESGETMTLDIQTCRNLEIISSMQDGSLNGSLLEVIDRTKNPMGARLLRRWLLHPLRKLEPVVRRHDAVGELLDAPEMREGIRGMLGGIIDLERALARIATSRAMPREVRQLGSSLAMIPQLKSLLEGSKSLRLRELALRLDPLPELAETIEKALDAEASGTLRDGGYIRAGYHAELDELRAISSGARDRLLEIQQQERQRTSISTLKVQYNKVFGYYIEVSRANSDKVPEYYEKKQTLVNAERYTIPALKEYEEKILTAEEKSQLLEHQLFQELCAMIAEQAASIQTTAAALAELDCLACFASCADEFGYCRPVMNEGTELSIRAGRHPVLERILGADEPYVANDCQVGSEQQLLIITGPNMAGKSSYLRQVGLVVLLAQVGCFVPAESAEIGLVDRIFTRVGASDNLTSGESTFLVEMNEAASILNNATERSLLLLDEIGRGTSTFDGMSIAWSMCEYIHDQLRSRTLFATHYHELAELESRFERIVNFNATVVETADTVIFLRKIVRGASDNSYGIEVAKMAGMPPEVIERAREILAGMERREVEVPVQRQALPLRVESRQISLFEEEESRLRKALSGIDINRLTPLDALMELKRLQEIALGKGA

SEQ ID NO: 4142 - DNA, 2850 bp, Clostridium difficile
  CDS (1)..(2850): transl_table=11
ttgataatgcaaatagatatgaataaattaactcctatgatgaaacagtatcttgaagtaaaaaatagatataaagactgtatactgttttttagacttggagatttttatgaaatgttttttgaagatgcattagtagcttcaaaagctcttgaaatagcattgacaggaaaagcttgtggtttagaagaacgtgctcctatgtgtggtgttcctttccactcagccaattcatatatatcaaaattagttgaaaatggatataaagtagcaataggtgaacaaatggaagacccatctacagcaaaaggaattgttagaagagaggttataagggtcatcactcctggtacagttttagatggaaatttacttgaaaataaaaagaataattatttattatctttgtataaggatggtactaatataggtctaacttatgttgatataagtacaggagaaactaatgcaacatgtttaaatgaagataaggtaattgaagaaattgcaaaaatccatccaactgaaataattataaatgatttagactttatagaaaagcttagagatatagctactgtaagtaatatatacataaatgaaagttttagtgataactatttggatataaatatattaaaagaatattttccagatgtttatctacaaaaactaaagtttgatgataaaggtctaataaagtcaagcttatcaattcttctgaattatatatacaatactcaaaaacaaataacatctaacattaataatataaatatatacaattcatcagaatatatggttctagatatgtttactagaactaatttagaacttactcaaactataagaggaaataagaaaaaaggttcattattacacgtacttgataaaacttctacagcaatgggaggtagacttttaagaaaatatgtagaagaacctttgataaataaatctaaaattgaaaatagattagatgtaatagaagaaataaaagatgactttatattaagagaagacctaaatgatatacttaaaaatatatacgatatagaaagaatatgtggaaagatagcatttgagagagtaacaccaaaagagttaattcacttaaaaaattcgatagaaaagttacctaatttaaaagatactataaatttatcaaatgcaaaaatcctaaaagagtatgtttcagaaatggataaattagatgatatatacaatttaatagatgaagctattctagaagaacctacgataaccataaaagatggaaacataattaaatcagattttagtgatgaacttaaggaactaagagagatttctaagaatggagcctttcttgtaaaggaaatagaaaacagggaaagagaaaaaacaggagttaaatcattaaaaataggatttaataaagtttttgggtattatatagaaataacaaaagccaactttaaacaagcaaagctagatgagacatatataagaaagcaaacacttagtaatgcagaaagatatataactccagaattaaaggaaatagaagaaaagatactacatgcagaggaaaagattaaatctttagaatacgagatatttgtagagataagagatacaatatataaaaacatagatagaatacaaaaagtggctaagactatagctaatatagatgtttttgtgtcccttgcaacagttgcacatataaataactatgtaaaaccagcaataaatgaaaataataaacttgatataagaaatggtagacatcctgttgtcgaaaatatagtaggagaggaaaatttcgttccaaatgatacttatttaaatcgtggagaaaacattattaacataataactggtcctaatatgtcaggtaaatcaacatatatgagacaaactgctataatagctcttatggcacatataggctcatttgtaccagcagagtctgctgatattccaatattagatagaatatttacaagagttggagctagtgacgatttatctcaaggtcaatctacttttatggtagagatgaacgaagtatcccttatattaaaaaatgcaacagagagaagtttagttatattagatgaaataggtcgtggaactagtacctatgatggtataagtttagcatggtcaatagtggaatatattcaaaaaaatattagatgtaagacattatttgcaacacattatcatgaacttactgatttagaagaagagtttaaagaggttaaaaattattcaatagcagtcaaagaagatggggaaggaataatatttttaagaaaaataattcctcaaggagcagacaagagttatggaatatatgttgctaaattagctaaattaccagacgaagtcatagaaagagcaaaatatatacttaaagacttggaaaaaaatcatgtttacaacagtgttgcaataaatggagataaagaaaacaataatataattaatagtaatttggacgaagaattagttaaggtaaatcaaagtaattttaagaataaatatgaatctctaaaaatagaacatgaacttatagtaaaagactacaaacatataaaaaaggattatgataaattaaattctaaatttaaagcattaaatgatgaagttgctttaatgaagcaaaatgatgataaagagaaaattaatcaagaagattctgtaaaagaagtagccttaactcaaatctcttttgatagtgtaaatagagatatactatcagaagaaattttaaatctggatattttaaatatgactccattagatgctataaactctctttataatcttcaaagaaaagcaaaagaaataaaatcttag

SEQ ID NO: 4143 - protein, 949 aa, Clostridium difficile
MIMQIDMNKLTPMMKQYLEVKNRYKDCILFFRLGDFYEMFFEDALVASKALEIALTGKACGLEERAPMCGVPFHSANSYISKLVENGYKVAIGEQMEDPSTAKGIVRREVIRVITPGTVLDGNLLENKKNNYLLSLYKDGTNIGLTYVDISTGETNATCLNEDKVIEEIAKIHPTEIIINDLDFIEKLRDIATVSNIYINESFSDNYLDINILKEYFPDVYLQKLKFDDKGLIKSSLSILLNYIYNTQKQITSNINNINIYNSSEYMVLDMFTRTNLELTQTIRGNKKKGSLLHVLDKTSTAMGGRLLRKYVEEPLINKSKIENRLDVIEEIKDDFILREDLNDILKNIYDIERICGKIAFERVTPKELIHLKNSIEKLPNLKDTINLSNAKILKEYVSEMDKLDDIYNLIDEAILEEPTITIKDGNIIKSDFSDELKELREISKNGAFLVKEIENREREKTGVKSLKIGFNKVFGYYIEITKANFKQAKLDETYIRKQTLSNAERYITPELKEIEEKILHAEEKIKSLEYEIFVEIRDTIYKNIDRIQKVAKTIANIDVFVSLATVAHINNYVKPAINENNKLDIRNGRHPVVENIVGEENFVPNDTYLNRGENIINIITGPNMSGKSTYMRQTAIIALMAHIGSFVPAESADIPILDRIFTRVGASDDLSQGQSTFMVEMNEVSLILKNATERSLVILDEIGRGTSTYDGISLAWSIVEYIQKNIRCKTLFATHYHELTDLEEEFKEVKNYSIAVKEDGEGIIFLRKIIPQGADKSYGIYVAKLAKLPDEVIERAKYILKDLEKNHVYNSVAINGDKENNNIINSNLDEELVKVNQSNFKNKYESLKIEHELIVKDYKHIKKDYDKLNSKFKALNDEVALMKQNDDKEKINQEDSVKEVALTQISFDSVNRDILSEEILNLDILNMTPLDAINSLYNLQRKAKEIKS

SEQ ID NO: 4144 - DNA, 2730 bp, Clostridium perfringens
  CDS (1)..(2730): transl_table=11
atgaagctgactccgatgatgaggcaatattttgagataaaggaaaattataaggattgtattctattttttagacttggagacttctatgagatgttctttgaggatgcagaaacagctgcaagggaattagaattagttcttactggaagagattgtggcttagaaaaaagagcacctatgtgtggaattccgtttcatgcatctaattcatatataggaagattagtagctaaaggatataaggttgctatttgtgaacaagttgaagatcctaaagttgctaaaggaattgttaaaagggatgttataaaggttataactcctggaacatatacagattcttcttttgttgaggaaacaaaaaataattatataatgactatatattcagacttagagagaaatagatgttcactagctataacagatatttctactggagatttcttagctacagagggagaattagaaaagggagttattttagatgaaatatctaagtttaatcctaaagaaataatacttttagattctttagatcaagagcttataaaagatataacattaactactccagccttaataagtagaaagcctatagaatattttgaggaaaaatttgaggaagtattaaatgctcaatttggagaaaaatcaaattctctaagtttaatggttaagaaatcaagtaatgctttagttaaatacatactagatactcaaaaaataagcttaactaatataaatgatatagaagtatatagtttggttgattttatgactatagatttaagttctagaagaaatttagagcttacagagaatttaagagaaaaaagcaagaaaggttctcttctttgggtattagataagacagaaacttctatgggaagtagaatgcttagaagatggattgaagaacctcttgttaataaggaaaagataactttaagattaaatgctgtagaagaattatttaatgatctttctttaaatgactctcttaaggaagctttacatgatatttatgatatagagagaatattaggtaaaatttcaaataagaatgctaatgctaaggatttaatagcattaaaaacttctataggtaaaattcctaatgtaaaaggaattatagaaaattgcacttcaagtcttctaaggaattatcatcataatttagatgatttaagagatatttatgaacttttagaaaaatctataaaagaagatccatctctaacattaaaagatggtgatttaataaaagatggatttaatagtgaaatagatgaattaagacttgctaagactaacggtaaggattggatatctagtttagaaaatagagaaagagagtttactggcataaaatctttaaaggtaggatttaataaggtctttggttactatatagaaatatctaaggctaattatagttctattcctgaaggaagatatataagaaagcaaactttagctaatgcagagagatttattactccagaacttaaggaaatagaagaaaaacttttaggagctagtgaaaaactttgctctttagaatatgatattttcctagatataagaaatgaagttgaaaatcatatagatagattaaaaactactgctaagataattgctgaactagattgtataagcaatttagcctttgtagctttagaaaatgattttataaaacctgaaattaatgaagatggggaaactaaaatagaaaatggaagacaccctgttgttgaaaaggtaattcctaaaggagagtttattcctaatgacactattataaataaagatgataatcaacttcttataataacaggtcctaatatggctggtaaatcaacatatatgagacaggtagctattattactttaatgtgtcaaataggttcctttgtaccagctagtaaggctaatataagtgtagtagataaaatctttactagaataggagcttctgatgatttagcaggtggtaaaagtacatttatggttgaaatgtgggaagtttctaacattttaaaaaatgctacagaaaatagcttggttcttttagatgaagttggaagaggaacgagtacatatgatggattaagtatagcttggtctgttatagagtatatatgtaagaataaaaatttaagatgtaaaactctttttgctactcattatcatgagttaactaaattagaaggagaaattcacggagttagaaactattcagtagctgttaaggaagtggataacaatattatcttcttaagaaaaataatagaaggtggagcagatcaatcttatggtattgaggttgctaaacttgctggtattccagatgatgtaataaatagagctaaggaaatcttagagaaacttgaaatggaatcttcaaaggataacttagatttagctcttaaagaagtaaatgcttcaaaagaagaaatgaaggaagcctctattacatcctcttatgaagttaaagaaactctagtagaagaggataaaattgaaattaaagaagaagttatttcaaaagcttcagaggctaaaacacataaagaagatgatcaaatacaattagatttctctgccataggaaaagataatttaataaaagaactttcagaagttgatattttatctttaaatcctatggaggctatgaatagattatatgctctagttaaagaagctaaaaatttaatttag

SEQ ID NO: 4145 - protein, 909 aa, Clostridium perfringens
MKLTPMMRQYFEIKENYKDCILFFRLGDFYEMFFEDAETAARELELVLTGRDCGLEKRAPMCGIPFHASNSYIGRLVAKGYKVAICEQVEDPKVAKGIVKRDVIKVITPGTYTDSSFVEETKNNYIMTIYSDLERNRCSLAITDISTGDFLATEGELEKGVILDEISKFNPKEIILLDSLDQELIKDITLTTPALISRKPIEYFEEKFEEVLNAQFGEKSNSLSLMVKKSSNALVKYILDTQKISLTNINDIEVYSLVDFMTIDLSSRRNLELTENLREKSKKGSLLWVLDKTETSMGSRMLRRWIEEPLVNKEKITLRLNAVEELFNDLSLNDSLKEALHDIYDIERILGKISNKNANAKDLIALKTSIGKIPNVKGIIENCTSSLLRNYHHNLDDLRDIYELLEKSIKEDPSLTLKDGDLIKDGFNSEIDELRLAKTNGKDWISSLENREREFTGIKSLKVGFNKVFGYYIEISKANYSSIPEGRYIRKQTLANAERFITPELKEIEEKLLGASEKLCSLEYDIFLDIRNEVENHIDRLKTTAKIIAELDCISNLAFVALENDFIKPEINEDGETKIENGRHPVVEKVIPKGEFIPNDTIINKDDNQLLIITGPNMAGKSTYMRQVAIITLMCQIGSFVPASKANISVVDKIFTRIGASDDLAGGKSTFMVEMWEVSNILKNATENSLVLLDEVGRGTSTYDGLSIAWSVIEYICKNKNLRCKTLFATHYHELTKLEGEIHGVRNYSVAVKEVDNNIIFLRKIIEGGADQSYGIEVAKLAGIPDDVINRAKEILEKLEMESSKDNLDLALKEVNASKEEMKEASITSSYEVKETLVEEDKIEIKEEVISKASEAKTHKEDDQIQLDFSAIGKDNLIKELSEVDILSLNPMEAMNRLYALVKEAKNLI

SEQ ID NO: 4146 - DNA, 2646 bp, Clostridium tetani
  CDS (1)..(2646): transl_table=11
ttgaaacttacaccaatgatgcagcaatacctagaagtaaaagaaaaatgtaaggattgtatattattttttagactaggtgacttttatgaaatgttttttgaagatgcagaaactgcatctaaggaattagaattagtattaacaggaagagattgtggtctttctaaaagagctccaatgtgtggcataccataccattcagcttctaactacataaatagattggtatccaaagggtataaaatagccatatgtgaacaattagaagatccttctgccgctaagggtatagttaaaagagatattgtaaaaatagttacacctggtacttattcagatagtaactttttaaatgaaacaaaaaacaactatataatgagtttatatatagaagataaatctgtggctatgtgtttttgtgatatatcaacgggagacttctttgccacaagccattctttagataaatctattatattggatgaaatctcaaagtttgaccctagtgagttattattaaataaagatatagacaaaaatattttaaaagaaataaaaaaccgctttactatatccattactaatttagaaaaagactattttaaggattataatttattagaaggacagttttcagacttctctaaagaagaatattctttagttttaataaagtgtggtaatggacttttaaaatacatattagaaacccaaaaaatgtcccttgggcatatagattgttttaaaaattataatatagtggactatttatctatggatataaattcaagaagaaatttagaaattacagaaactattagagataaatctagaaaaggatctcttctatgggttctagataagtgtagtactgctatgggggctagacttataagaaattgggtagaacaacctttgataaataaagaaaaaattgataaaagactaaatgctgtagaggaattagtattaaatatatccctacatgaagatttaaaagatgctttaaaagatatttatgatatacaaagaatagttggtaaaatatcatctaaaaatgtgaatgcaaaggaacttctttcattaaaaaattctatagaaaaattaccctatataaaagatatattaagtaaattagaagcggatttatttaaagatatgttatcaaatctagacgaattaaaagatatctatgaattattagaaagctctataatggataatccgcctattacaataaaagatggtaatcttataaaaaatggatttaacaaagaaatagatgaattaagaatggctaaatctcatggtaaggaatggattgcaaaccttgaaagtagtgaaagggagtttactggaataaagtctcttaaagttggatacaataaagttttcggatatttcattgaagtcacaaaatctaacatttcctctgtacctgaaggaaggtatgtaagaaaacaaactctatcaaattgtgaaagatacataactcctgaattgaaagaaatggaagataaaattttaggagcagaagaaaaattaattagtcttgagtatgaagtatttgtaagtataagaaattctatagaaaaagacatagatagaatgaaaatatctgcaaatatagttgctatcttagattgtttaagttccttatctacagtagctttagaaaataattattcaaaacctaaaatattagaaggaaatgatataattattaaagatggtcgacaccctgtagtagaaaaaatgattcctacaggtagctttgtagctaatgatacaactatggatactgaagataatcaaatgttattaattacaggacctaatatggcaggaaaatctacctatatgagacaagtagctttaatcactataatggctcaaataggcagtttcgttcctgcaaaggaagcctccatatccctttgtgataaaatatttacaagaataggagcttctgatgacttatctgctggtaaaagtacctttatggtagaaatgtgggaagtttctaatatacttaaaaatgctacttctaaaagcttaattatcttagatgaagttggtaggggaactagcacttttgatggattaagtatagcttgggctgttattgaatatatttgcaataataaaaacttaagatcaaaaactctttttgccacacattatcacgaattaattcaattagaaaataaaattaagggtgtaaaaaattactcagtatcagtaaaagaaatggataaagatattgtatttttaagaaagataatagaaggtggagcggatcaatcctatggtatagaagttgcaaaacttgctgggcttccagaggatgtaattataagagctaaagaaatactaaatagtatagaacaaaataaagacaataaaatagaacttgatgacataaaagagaataaaaatcatattgaaaaagaaaataaaaaagagatagcaactgataaattattagcaaacgatgattttcaaattagctttactcaaattgaagaagaaaatctaatcaaagaaatttcttcaattgatatattaaatttaaatcctatggaggggtttaataaattatatgatttaattaataaagctaagtctattgaaaaaaagtag

SEQ ID NO: 4147 - protein, 881 aa, Clostridium tetani
MKLTPMMQQYLEVKEKCKDCILFFRLGDFYEMFFEDAETASKELELVLTGRDCGLSKRAPMCGIPYHSASNYINRLVSKGYKIAICEQLEDPSAAKGIVKRDIVKIVTPGTYSDSNFLNETKNNYIMSLYIEDKSVAMCFCDISTGDFFATSHSLDKSIILDEISKFDPSELLLNKDIDKNILKEIKNRFTISITNLEKDYFKDYNLLEGQFSDFSKEEYSLVLIKCGNGLLKYILETQKMSLGHIDCFKNYNIVDYLSMDINSRRNLEITETIRDKSRKGSLLWVLDKCSTAMGARLIRNWVEQPLINKEKIDKRLNAVEELVLNISLHEDLKDALKDIYDIQRIVGKISSKNVNAKELLSLKNSIEKLPYIKDILSKLEADLFKDMLSNLDELKDIYELLESSIMDNPPITIKDGNLIKNGFNKEIDELRMAKSHGKEWIANLESSEREFTGIKSLKVGYNKVFGYFIEVTKSNISSVPEGRYVRKQTLSNCERYITPELKEMEDKILGAEEKLISLEYEVFVSIRNSIEKDIDRMKISANIVAILDCLSSLSTVALENNYSKPKILEGNDIIIKDGRHPVVEKMIPTGSFVANDTTMDTEDNQMLLITGPNMAGKSTYMRQVALITIMAQIGSFVPAKEASISLCDKIFTRIGASDDLSAGKSTFMVEMWEVSNILKNATSKSLIILDEVGRGTSTFDGLSIAWAVIEYICNNKNLRSKTLFATHYHELIQLENKIKGVKNYSVSVKEMDKDIVFLRKIIEGGADQSYGIEVAKLAGLPEDVIIRAKEILNSIEQNKDNKIELDDIKENKNHIEKENKKEIATDKLLANDDFQISFTQIEEENLIKEISSIDILNLNPMEGFNKLYDLINKAKSIEKK

SEQ ID NO: 4148 - DNA, 2613 bp, Clostridium thermocellum
  CDS (1)..(2613): transl_table=11
atggcttcattgacacctatgatgcaacagtatcttgaaataaaggagcagtacaaggactgtatcctttttttcagattgggagacttttatgaaatgtttttctctgacgcggaagtagcttcaagggaactggaaataacgcttacgggaaaagattgcggccttgaagagagagctcccatgtgcggagtgccttttcattcagcggattcatatattgcgaaactgattagcaaaggttataaagttgcgatatgtgagcagattgaagatcctgcgctggcaaaaggattggtcaagagggacgtaatcaggattgttactcccggtacagtgaccgattccgctatgttggatgaaaaaaagaataactatcttatgtcgatttataaaaacaaaaactattacggtattgcatgtgttgatcttaccacaggagagtttttgtcgacacacattaccttcggcaacactttcaacaaattaatggatgaaatagcgaaattctcaccatcggaaattgttgtaaacggtgagttttttcatgacgaaaacatcaaaaagactttaaaacaaaggtttgatgtttatatctccggtttggaggacaaattttttgaaaaggagttttccatacagaaggtaagaaattattttaaggattatgtgattgaagaaaatgcgtttgatttatacataaatgcttccggagctcttttggaatatttggagcagacgcagaaagtgaatttaagccatattcagaattttaacgtctacaggattgaagagtacatgattctggacatggccaccagaagaaaccttgaacttacggagaccatgagggaaaagaacagaaaaggctcccttctttgggttttggacagaaccatgacctccatgggcggaagaaccctgagaaaatggattgaacagccccttataaacctccatgatataaaggacaggcttgatgcggtaaacgagtttaaagaaaggtttatgataagaagcgaagtacgggagcttttaagagcggtttatgacattgagaggctgatgacaaaggttattctgggaagtgccaattgccgcgatttgatatcgataaaacactctatcggacaggttccgtatataaaggagcttcttcgtgatttaaaagccgatcttaatgttttaagctacaatgaattggatacactaactgatgtgtatgaaattattgacaaggctatagtcgatgacccgcctgttgcggttaaagaaggcggaatcataaaagaaggttttaatgaggaggtggacaggctaagaagcgcatcaaaagacggaaagaagtggattgcacatttagagagcaaagagagggaaagaaccggtattaaaaatttgaaagtgggatttaacaaggttttcggctattacattgaagtgaccaaatcctactactcacaagtaccggatgattatataaggaaacagaccttggcgaactgcgaaaggtacataacaccggagctgaaggaaattgaaaataccgtattgggtgcggaggacaggcttgtagagcttgaatatcagatatttgtggatgtgaggaacaaggttgcaaaagaaataaacagattaaagaccacggcaagaagtcttgccagaatcgatgttttatgctcactggcggaagtggcggacagggaatcctatactatgccggaagtgaccgatgacgacaaaattgaaattaaagacggaaggcatcctgtggtagagaagataatcgggcaggaagcctttgttcccaatgatacctatcttgacatggatgaaaaccaaattgctataattaccgggcctaatatggcgggtaagtcgacatatatgcggcaggtggcgttgattgtgcttatggcccaaataggaagctttgttcccgccaaaagtgccaaaataggcatagttgacaggatatttacaagggtaggcgcttcggatgacctggcagcaggccagagtacctttatggtggaaatgtccgaagttgcgaatatccttggcaatgccacgtcaaaaagcctgttggtattggatgagataggcaggggtacaagcacctatgacggactgagtatcgcatgggctgtaattgagtatatcggtgagaagataggggcaagaacgctctttgccacccattaccatgaacttaccgaactggaagaaagaattgaaggaataaagaattattgcatatccgtggaggaaaagggagaagatataattttcttaagaaaaatactcaggggcggagccgacaacagctacggcgtgcaggttgcaaggcttgcaggcataccggatcctgttattcacagggcaaaagaaatattaaaaaaattggaagatgcggacataaccaggaaggaaaaacgtattacaaggagaaaacagcccattgaggggcaaattgacgtatttacgtttaacgccgcccagagaagttatgatgaggttctgaatgaattaaagagtcttgatattacgactttgacaccgcttgatgcaataaatgtattatacaatcttcaaaaaaaggtaaaagggtag

SEQ ID NO: 4149 - protein, 870 aa, Clostridium thermocellum
MASLTPMMQQYLEIKEQYKDCILFFRLGDFYEMFFSDAEVASRELEITLTGKDCGLEERAPMCGVPFHSADSYIAKLISKGYKVAICEQIEDPALAKGLVKRDVIRIVTPGTVTDSAMLDEKKNNYLMSIYKNKNYYGIACVDLTTGEFLSTHITFGNTFNKLMDEIAKFSPSEIVVNGEFFHDENIKKTLKQRFDVYISGLEDKFFEKEFSIQKVRNYFKDYVIEENAFDLYINASGALLEYLEQTQKVNLSHIQNFNVYRIEEYMILDMATRRNLELTETMREKNRKGSLLWVLDRTMTSMGGRTLRKWIEQPLINLHDIKDRLDAVNEFKERFMIRSEVRELLRAVYDIERLMTKVILGSANCRDLISIKHSIGQVPYIKELLRDLKADLNVLSYNELDTLTDVYEIIDKAIVDDPPVAVKEGGIIKEGFNEEVDRLRSASKDGKKWIAHLESKERERTGIKNLKVGFNKVFGYYIEVTKSYYSQVPDDYIRKQTLANCERYITPELKEIENTVLGAEDRLVELEYQIFVDVRNKVAKEINRLKTTARSLARIDVLCSLAEVADRESYTMPEVTDDDKIEIKDGRHPVVEKIIGQEAFVPNDTYLDMDENQIAIITGPNMAGKSTYMRQVALIVLMAQIGSFVPAKSAKIGIVDRIFTRVGASDDLAAGQSTFMVEMSEVANILGNATSKSLLVLDEIGRGTSTYDGLSIAWAVIEYIGEKIGARTLFATHYHELTELEERIEGIKNYCISVEEKGEDIIFLRKILRGGADNSYGVQVARLAGIPDPVIHRAKEILKKLEDADITRKEKRITRRKQPIEGQIDVFTFNAAQRSYDEVLNELKSLDITTLTPLDAINVLYNLQKKVKG

SEQ ID NO: 4150 - DNA, 2619 bp, Colwellia psychrerythraea
  CDS (1)..(2619): transl_table=11
atgaccactgccacaaaagatctttcatcacacacccctatgatgcgccagtacttaactattaaggctgaatttccacatactttgatcttttatcgcatgggtgatttttatgaattattttttgacgatgccaaaaaagcttctgacttattagatatatcacttaccgctcggggtaaaactggcggtaatgctattccaatggcgggtgtgccatatcatgcggctgaaaactacttagcgaagctagtcgccctaggtgaatcggtcgctatttgtgagcaaattggcgatcctgccacgagtaaaggcccagtagagcgaaaagtcgtacgtgttattacacccggtactgttagtgatgaagcactgctagtcgacaggcaagacaatctcattgttgccatcgtcgataatcaatccccaaatgcaaaactaaaaacaagctcagcacccgcttttggtcttgcttatttagatatggccagtggtcgatttgtactcactgaaccacaaactgctgaacaactccaagctgaacttcaacgtttatctcctgcagaattactttatagtgaatctctacaagactttagtttaatcgagcaaagaaaaggtttacgtcgtcgtccagagtgggagtttgatcttgatactgccattagtttattgaataagcagttcgataccaaagaattaactggttttggtgttgatgacaagcctttaggtctggctgctgcaggttgtttatttcaatacgttaaagatactcaacgtactgccctgcctcatattcgcgccattgtttgtgagtctgccaataaaggtgtggtacttgatgcagccactagacgaaatttagaactgacccaaaacttacatggcggtttagataatacccttgctgctattttagataaatcttccacaccaatggggtctcgtttacttaaacgctggttacactttccattacgtgatttaacggttcttaataaccgccaaaatacggtgagtgatatcatagcattagatcttatcgcgcctattcagccattattaaaaggcttgggtgacattgaacgtattgtttctagaatcgccttaggctctgcaaggcctcgtgattttgctcgtttacgtcatgctctacaacaattaccagagttacagaatgagttaaaaagtggattaacagaatcccctactaactacttagccactattgctcagcaaagccagccaatgcctcaactagaaggcttgctagtacatgccattgttgaaaacccacccgtactaatacgtgatggtggtgttatcgcaccaggttataataacgagcttgatgtactacgcgatttaagtgatggtgcgactgagtttttagcgcaacttgaacaacgtgagaaagaacgtactggcatccactcattgaaagtaggttataacagggttcatggcttttttattgaaatgagtcgtaccgccgccgttgatgtacctgatgattacattcgccgtcaaacattaaaaaataatgaacgttttattaccgaagaattaaagcaacatgaagagaaagtacttagcgctcaaagtaagtttttagccctagagaaatcactctatcaagagttattcgataaagtattacctgatttagcgcaactgcagcaattaagtcaagccattgctgagctcgatgtattaactaccttcgcagaacgtgcattagcgctaaactacgtaaaacctagcttagttgaagaaccaggcattagtattgatgctggtcgtcatgttgtcgttgaacaaatgactaacgatgcctttatcgccaacccagtgttgttaacagaacagcgaaagatgttaattattactggtccaaatatgggcggtaaatctacctatatgcgccaaacggccttaatagttttacttgctcatataggttgttatgtgcctgctgacaacgcgaccataggtttagttgataggatatttacccgaattggtgcttccgatgatttagccagtggccgctcaaccttcatggtcgaaatgactgaaacggcaaacattttacacaacgctacggataaaagtttagtgctgcttgatgagattggccgtggaactagtacttacgatggcttatcactcgcttgggcttgtgctgaaatgttagcacttaaaaccaaagcttttactttattcgcgacccattattttgagctgactttacttgccggtcaaatttcaaccttagccaatgtgcacttagatgccatggagcatgacgataacatcgtctttatgcatgcagtacaagaaggagcggctagcaaaagttttggtttgcaggtagcacagttagcaggtgtaccaaaaacagtgatcaagcgtgctaaacaaaggttaagtgaattagagcaacagcaaacgccaagcatactaccagcacctatacaaaatgatgcctttgaacagctcagtttcgcccctgaagagcattcagtggtaacaacacttattgataccgatattaatgagctaagcccgagacaggcactagacttattatttagcttaaaagaacaactctaa

SEQ ID NO: 4151 - protein, 872 aa, Colwellia psychrerythraea
MTTATKDLSSHTPMMRQYLTIKAEFPHTLIFYRMGDFYELFFDDAKKASDLLDISLTARGKTGGNAIPMAGVPYHAAENYLAKLVALGESVAICEQIGDPATSKGPVERKVVRVITPGTVSDEALLVDRQDNLIVAIVDNQSPNAKLKTSSAPAFGLAYLDMASGRFVLTEPQTAEQLQAELQRLSPAELLYSESLQDFSLIEQRKGLRRRPEWEFDLDTAISLLNKQFDTKELTGFGVDDKPLGLAAAGCLFQYVKDTQRTALPHIRAIVCESANKGVVLDAATRRNLELTQNLHGGLDNTLAAILDKSSTPMGSRLLKRWLHFPLRDLTVLNNRQNTVSDIIALDLIAPIQPLLKGLGDIERIVSRIALGSARPRDFARLRHALQQLPELQNELKSGLTESPTNYLATIAQQSQPMPQLEGLLVHAIVENPPVLIRDGGVIAPGYNNELDVLRDLSDGATEFLAQLEQREKERTGIHSLKVGYNRVHGFFIEMSRTAAVDVPDDYIRRQTLKNNERFITEELKQHEEKVLSAQSKFLALEKSLYQELFDKVLPDLAQLQQLSQAIAELDVLTTFAERALALNYVKPSLVEEPGISIDAGRHVVVEQMTNDAFIANPVLLTEQRKMLIITGPNMGGKSTYMRQTALIVLLAHIGCYVPADNATIGLVDRIFTRIGASDDLASGRSTFMVEMTETANILHNATDKSLVLLDEIGRGTSTYDGLSLAWACAEMLALKTKAFTLFATHYFELTLLAGQISTLANVHLDAMEHDDNIVFMHAVQEGAASKSFGLQVAQLAGVPKTVIKRAKQRLSELEQQQTPSILPAPIQNDAFEQLSFAPEEHSVVTTLIDTDINELSPRQALDLLFSLKEQL

SEQ ID NO: 4152 - DNA, 2616 bp, Coxiella burnetii
  CDS (37)..(2616): transl_table=11
ttgagtatctccacggctttcactaagcttttagtgatggaacttcaaacaaaatcgccaacgacgcaaaatgattttagtcagcacacgcccatgatgcgtcaatacttacgcattaaagccgagtaccccgatcttttagttttttaccgcatgggtgatttctatgaattattttatgatgacgctaaaaaagcggcgaaattattaaatattacgctaaccgctcgaggtcaatcggccggtcatgccattccgatggccggtgttccctaccatgccgtcgaaaattatttaacaaaactagttcgactcggcgaatccgttgtcatttgcgagcaaattggagaccccgcaaccagtaaaggtcctgtcgctcgcgaagtcacccgtattatcactccaggtaccgttagcgacgaagcactgcttgatgaacatcgcgacaacaccttaatggtaattcatcaagagaaagatcgtttcggtatcgcgacattagatattaccagcgggcgttttttgattcaggaaatcatttctgaaaatgcactattcgctgaaattgaacgcattcgcccggcagaacttttaatcagtgaagaaaatagcgttcatccgctaaaagccgactccatcaagcgccgacctccgtgggaatttgatcatgccactgcgctcactttattgtgccaacaatttcagacaaaaagtttggatggatttggtattactcatttgccgctggccattacggcggcaggatgtttgctgcaatatgttaattacacacaaaaaagcgccctgcctcatattcactccattcaagccgaacaaaatgaggaagccctatttatcgacgctaacacgcgccgtaaccttgaattaatcaccaatttacaaggcgaagaagttcactctctggcttggctgctcgatcacacagccacccccatgggaagccgattattacgccgctggattaatcggcccttgcgcgaccaaattttattgcaacaaaggcaaaacgccgtttctacccttctcgaaaaaagaaattattcggaaatctacgaaaatttacgccatattggcgatctcgaaaggatagtggcacggatcgcacttcgctctgctcggccccgagatttaatgcaactgcgccaggcgctcggtgtattgccaacccttcaccaacagctcaccaacttgccgcttaataaacaattacaagaaattaaaaataaccttggtcttttcgatgaattatttcgattattaaaaaaagcgattatcgaaaacccaccgatcgttattcgcgatggcggcgtgattgccgatggttatgacgcgccattggatgaactgcgcaatatgagcaccaacagtcaccaatttttaattgacttagaacaacaagagcgcgaacgcaccaaaataaatacggttaaagttggctataatcgcatccatggttattacattgaaatttcacgcgcccaagccaaacaagcccctacggaatatattcggcgacaaaccctaaaaaacgtggaacgttacatcactcccgaattaaaaatttttgaagacaaagtgttaagcagccgctcccgcgcactggcccgcgaaaaagaactttacgaacaattattggatactttaatcgaaaaattaattcctttacaacaatgcgcaagtgcaattgcaaacctggacgttttaaataccctcgctgaacgggctgacacacttaattttaacgcgccacagttttgcgattaccctattattaaaattgaggctgggcgtcaccctattgtggaaaatgtaatgaccgatccgtttatgcccaatgacactcatctcgacgaaaagcgccgaatgcttatcattactggcccgaatatgggtggtaaatccacttacatgcggcaaacggctttaatcactttactcgcctatattggcagtttcgtacccgctaaaaatgcgcaacttggacccattgatcgcatcttcactcggatcggtgcggcagatgatttagccagtggccgatcaacctttatggtagaaatgactgagactgcagcgattttgcataatgcgacagaagaaagtttagtgctaatggatgaagttggccgcggtaccagtacgtttgatgggctttcgttggcttacgcttgcgcttcttatttagcaacaaaattaaaagcttttgccttatttgcaacccattattttgaattgacagctttagcttcgacactacaggcggttaaaaatgttcacttagacgctgtggagcacgaagaaaaaattatttttttacacgctctgagggagggaccggcgaataaaagttatggattgcaagtagcgcagctagcaggaattcctcgctcagtaattcagcatgcccggcaaaaattagaagagttggaaaatcccgttatttcggaaacccaacaaccccaacaaaatgaactttttcttcccatagaaaatcctgttttaacgcaattagacaaactcaatcccgataacctaacgcctaaacaagctttagatatcctttatcaattaattcaattacgtcagcaaaaatga

SEQ ID NO: 4153 - protein, 859 aa, Coxiella burnetii
MELQTKSPTTQNDFSQHTPMMRQYLRIKAEYPDLLVFYRMGDFYELFYDDAKKAAKLLNITLTARGQSAGHAIPMAGVPYHAVENYLTKLVRLGESVVICEQIGDPATSKGPVAREVTRIITPGTVSDEALLDEHRDNTLMVIHQEKDRFGIATLDITSGRFLIQEIISENALFAEIERIRPAELLISEENSVHPLKADSIKRRPPWEFDHATALTLLCQQFQTKSLDGFGITHLPLAITAAGCLLQYVNYTQKSALPHIHSIQAEQNEEALFIDANTRRNLELITNLQGEEVHSLAWLLDHTATPMGSRLLRRWINRPLRDQILLQQRQNAVSTLLEKRNYSEIYENLRHIGDLERIVARIALRSARPRDLMQLRQALGVLPTLHQQLTNLPLNKQLQEIKNNLGLFDELFRLLKKAIIENPPIVIRDGGVIADGYDAPLDELRNMSTNSHQFLIDLEQQERERTKINTVKVGYNRIHGYYIEISRAQAKQAPTEYIRRQTLKNVERYITPELKIFEDKVLSSRSRALAREKELYEQLLDTLIEKLIPLQQCASAIANLDVLNTLAERADTLNFNAPQFCDYPIIKIEAGRHPIVENVMTDPFMPNDTHLDEKRRMLIITGPNMGGKSTYMRQTALITLLAYIGSFVPAKNAQLGPIDRIFTRIGAADDLASGRSTFMVEMTETAAILHNATEESLVLMDEVGRGTSTFDGLSLAYACASYLATKLKAFALFATHYFELTALASTLQAVKNVHLDAVEHEEKIIFLHALREGPANKSYGLQVAQLAGIPRSVIQHARQKLEELENPVISETQQPQQNELFLPIENPVLTQLDKLNPDNLTPKQALDILYQLIQLRQQK

SEQ ID NO: 4154 - DNA, 2589 bp, Desulfitobacterium hafniense
  CDS (1)..(2589): transl_table=11
ttgccaagacaatctatctctaaggagtcaccaacaatgaccacaccgatgatgcaacaatacaaatccataaaatctcaagctcccgacgcgatcctcttcttccgcttaggagatttttatgaaatgtttggcgaggatgcccggaccgccgcccctattctggaaattgccttaaccggccgtgattccggaggaggggagaggattcccatgtgcggtgttccccaccatgccgtagacggctatctgctcaagctggtttctgccggctataaggtggccttatgcgagcaagtggaggaccctcaagccgctaaagggatcgtcaaacgagagattatccgaatcatttcccccggtactctgacggattccttagtggagcaggccaataactttttagccgcggtctatcatgagcaggactggggattggcttttgtggatgtttccacaggggagtttacggtttttcagactgaatccttggatatcttaaccactgagctttcccggattcgtccttccgaattgctgctcccggcggaactcctcaaagccaagcactggcgcccttattaccttactcagcgggaaaagaaaacctatcagcacaccttgctggaggagcgctttacggaacagagggagttgtttcaggaatttcccacagccatgaaagccgccaatgggctttggcaatatatcctggaaacctcacccggcatcgatccctcccatattctgaaggttaatgcctaccgtcctgagcactggatgctccttgatccctggacccgcagaaatctggagcttacggaatccattcgcggccaagggaaaaaaggaaccttattatccgttttggactttaccaaaaccgccttcggcggccgcctgctcagacgctggatcgagcagcctttgctccttaaaggggaaatcgaaaagcgtttggattatgtggaggccttggttgaggacagttttttacggggagaccttattcaactcttcggcaaagtttatgatctggagcgtctcatggggaaggtttcctatggcaccgccaatgcccgggacttattatccttggctcagaccttaggggtgctgccccaactccgggctttgctggcggagggcaagtcggaacccctgcaagcctttattccggctttggaaggtctggaccctttggctgcaaccttggagcaagccatcaatccggaagcccccatctccctcaaggacgggaacctgctgaaagccggttactcagtggaaattgacgaattgcgcagcatatcctccgggggaaaagcctgggtagccaaattagaaagcatggaaaaggaccggaccggaatccgctcccttaaagtgggctataataaagtatttggttattatatcgaagtgactcatgctaattcccatctgatacctgctgaatacattcgcaagcaaaccttagccaatgctgagcgttttatcaccccggaactgaaggagtatgagcaaaaaatcctgggtgccgaagagaaagtcactcagctggagtatcagctctttctcgaacttcgggaaacagtccgcggtcaggccgctaagattttagaagccgcccatgctctggccgaaatcgacgtctataccagcctggcggaagccgctgtccgccatcattattcccgtcctgtgatgaagggggaaggggggctcaccatcattgaggggcggcatcctgtggtggaatctatgctccaggatacttcctttgtccccaacgataccatcctgactgaagataagcatctggccttgatcaccggccccaacatggccggtaaatccacctacatgcggcaggtagccctgatcgtcctgatggctcagattggcagctttgtgcctgcccagcaagccaccattcccatcgccgatcatatctttacccgggtgggggcctccgatgacttagcctcaggacaaagcacctttatggtggagatgtacgaagtggcccatattctgcgccatgttacaccccagagcctgatcattctcgatgaagtggggcgggggacagccacctatgacgggctcagcattgcctgggctgtggctgagtacttagccggccaggagaacaaacccaaaactctctttgccacccattatcatgaactgacggatttggaggaaacccatagcggtatcttcaatcttcatgtgggggttcgggaacatggggaagagattgttttcctgcataagattattcccggccgtgccgaccgcagttatggcattcaagtggccaaactggccggtctgcctgccaatctgctgcacagggccaaaatcattttgcatgaattggaatcctccgccaaggaaagccgccaggagcatttatttaataaggaaaaagcgacccaactgtccttgttcgaggttcagcccctggatcccctgttgcaggaagtcagcgagctttctgtggaggatttgacccccaggcaggctttggattacttgtttgatttaaaagaacggattaaagcagcggattctctttag

SEQ ID NO: 4155 - protein, 862 aa, Desulfitobacterium hafniense
MPRQSISKESPTMTTPMMQQYKSIKSQAPDAILFFRLGDFYEMFGEDARTAAPILEIALTGRDSGGGERIPMCGVPHHAVDGYLLKLVSAGYKVALCEQVEDPQAAKGIVKREIIRIISPGTLTDSLVEQANNFLAAVYHEQDWGLAFVDVSTGEFTVFQTESLDILTTELSRIRPSELLLPAELLKAKHWRPYYLTQREKKTYQHTLLEERFTEQRELFQEFPTAMKAANGLWQYILETSPGIDPSHILKVNAYRPEHWMLLDPWTRRNLELTESIRGQGKKGTLLSVLDFTKTAFGGRLLRRWIEQPLLLKGEIEKRLDYVEALVEDSFLRGDLIQLFGKVYDLERLMGKVSYGTANARDLLSLAQTLGVLPQLRALLAEGKSEPLQAFIPALEGLDPLAATLEQAINPEAPISLKDGNLLKAGYSVEIDELRSISSGGKAWVAKLESMEKDRTGIRSLKVGYNKVFGYYIEVTHANSHLIPAEYIRKQTLANAERFITPELKEYEQKILGAEEKVTQLEYQLFLELRETVRGQAAKILEAAHALAEIDVYTSLAEAAVRHHYSRPVMKGEGGLTIIEGRHPVVESMLQDTSFVPNDTILTEDKHLALITGPNMAGKSTYMRQVALIVLMAQIGSFVPAQQATIPIADHIFTRVGASDDLASGQSTFMVEMYEVAHILRHVTPQSLIILDEVGRGTATYDGLSIAWAVAEYLAGQENKPKTLFATHYHELTDLEETHSGIFNLHVGVREHGEEIVFLHKIIPGRADRSYGIQVAKLAGLPANLLHRAKIILHELESSAKESRQEHLFNKEKATQLSLFEVQPLDPLLQEVSELSVEDLTPRQALDYLFDLKERIKAADSL

SEQ ID NO: 4156 - DNA, 2640 bp, Desulfotalea psychrophila
  CDS (1)..(2640): transl_table=11
atgccaaaattaaaaataaccccgatgatgcagcagtactttaagctcaaagaacaacatccccataccatcctcttttaccgaatgggagatttttacgagatgttctttgaggacgccatcaccgcctccaagattcttggtatcaccctcacctcccgcaataagaaatcggacagtgctcaaatacccatgtgcggaatcccctaccatgccctgcagggatatctggcaaagatggtagaggcgggcaagcgagtagcaatctgtgaacaggtggaggatcccagtacagcccaaggtattgtcaaacgagaggtggtgcagatagtcactcccggagtggtcacagacaatcaactcctcgatgccaagagcaataactttgtcacggccattagcaggggaaaaaacaaccgctatggtctctcctttcttgatattaccaccggtgagttcatcgttgccgattttgccgggagcgatggtgaggcagatatcctcgaccaactgacccgcctcacccccacagaactgctcgtctcagaagaggagctagaggactttgccgagaccatcgatcttgccaccaccctcatccccggcctctgtataaccccgcgcccccaccacctctttgactttgaccaatcgcatgaaaagctgcttgaacatttcgccgtcatcagtctggatggatttggatgtgagacccttgtcgagggacagatcgccgcggccatactcctcgactatattgaggagacccaaaaatctgccatccaccatatagagaagctgagccgcctggaactcgatgccatcctgcaaatagatgactcttcgcggcgtaaccttgaacttacccagacaattgtcggtggcaaccgaagcggttccctgctctccgtccttgatctgaccacaacgcccatgggggccagatttctcaaacaggccatcctctttccccttcaggacagggcaagaatcctccgccgcctcaacgcagtgggctatttttttaacaactcagaggcacgtcaccagatcagagagttgctcgatcaggtctatgatatagaacgactcaacagcaggatcaccctgggctcggccaatggccgcgatatgctggccatgaaacagtctctggcccgcctgcctgaaatgctgacagagctacgaaaatgcgataccgatgagctgatagagatcgagcagacacttgatactctggaagacctgcaccaactcttggataaaagcatccacccagacccaccgacaaatatacgagagggaaacctcattcgggaaggttataatgccgagcttgatgagatcattgttctcctccgggatgggaagaaactcattcttgatctggaggccaaagagagggaacgaacggggattgccaagctcaaggtgagttacaacagggtctttggctatttcatcgaggtgagcagggcccagagttctcgggtaccggaacactatattcgtaagcagaccctggtcaatgccgagagatttatcacccctgaactgaaggagtttgaaaccaaggtcctgggcgccgaagatcgcagactagaactggagtatcagctctttgccactgtccgaaatgagcttgccagccattccagcaggtttctggccacagctcaccagttggcccttcttgatttttatgcctcggccgccgaagtatcacagcagtacaactatcaccgacccgagatcagagacgatggcagcctggagatacgagagggacgacaccccgttatcgagagatcactaccggcaggaaagttcgtccccaacgacgtctatcttgatcaggctgaaaatgaaattctggttatcaccggcccgaatatggccggtaaatccacggtactgagacaaacggccctcattgtcctcatggcccagatgggctactatgtacccgcagattccgcccgaatcggggttgttgaccgaatatttacccgggtcggggcaatggatgacctacgcaggggccaatccacctttatggtggagatgagtgaaaccgccaatattctcaacaatgccaccccgcgcagtcttgttatcctcgatgagatcggtcggggtacatccacctacgatggtctctccatcgcctgggctgtaacagaacacctggtgcaaaaagacggtatcggagtcaagaccatgttcgccacccactaccacgagctcaccgatctggcccgcagatatgcacggatacagaactactccatcgctgtacgggagtggcagaagagcgttatcttcctccataagctgataaagggtggtaccagccgcagttatggtattcaggtggcggctctggcaggcgtccccgcccaggtggtggaacgggcccatgaaatactgcacagcattgaatccggagattttctagcaggagaaaaggtaggagggcagcctcagaaggagctgagcgagcacaagccccaccagccctccctctttgcccctccgaccgacgagatacggacaaagatcagggaaatggatttagacgagctgacacccagacaggcacttgatgccctctacgccctaaaggagatgaccgtctag

SEQ ID NO: 4157 - protein, 879 aa, Desulfotalea psychrophila
MPKLKITPMMQQYFKLKEQHPHTILFYRMGDFYEMFFEDAITASKILGITLTSRNKKSDSAQIPMCGIPYHALQGYLAKMVEAGKRVAICEQVEDPSTAQGIVKREVVQIVTPGVVTDNQLLDAKSNNFVTAISRGKNNRYGLSFLDITTGEFIVADFAGSDGEADILDQLTRLTPTELLVSEEELEDFAETIDLATTLIPGLCITPRPHHLFDFDQSHEKLLEHFAVISLDGFGCETLVEGQIAAAILLDYIEETQKSAIHHIEKLSRLELDAILQIDDSSRRNLELTQTIVGGNRSGSLLSVLDLTTTPMGARFLKQAILFPLQDRARILRRLNAVGYFFNNSEARHQIRELLDQVYDIERLNSRITLGSANGRDMLAMKQSLARLPEMLTELRKCDTDELIEIEQTLDTLEDLHQLLDKSIHPDPPTNIREGNLIREGYNAELDEIIVLLRDGKKLILDLEAKERERTGIAKLKVSYNRVFGYFIEVSRAQSSRVPEHYIRKQTLVNAERFITPELKEFETKVLGAEDRRLELEYQLFATVRNELASHSSRFLATAHQLALLDFYASAAEVSQQYNYHRPEIRDDGSLEIREGRHPVIERSLPAGKFVPNDVYLDQAENEILVITGPNMAGKSTVLRQTALIVLMAQMGYYVPADSARIGVVDRIFTRVGAMDDLRRGQSTFMVEMSETANILNNATPRSLVILDEIGRGTSTYDGLSIAWAVTEHLVQKDGIGVKTMFATHYHELTDLARRYARIQNYSIAVREWQKSVIFLHKLIKGGTSRSYGIQVAALAGVPAQVVERAHEILHSIESGDFLAGEKVGGQPQKELSEHKPHQPSLFAPPTDEIRTKIREMDLDELTPRQALDALYALKEMTV

SEQ ID NO: 4158 - DNA, 2415 bp, Ehrlichia canis
  CDS (1)..(2415): transl_table=11
gtgaatcatgatagaaaaataactcctataatgcagcagtatatgatgttaaaaaatcagtataaggagtgtttgttattttataggttaggtgatttttatgagttattttttgatgatgcaatagagacatctaaggtattgaatattgttctgacaaaaaaaggaaatgtacctatgtgtggtgttccttttcatagtagtgagtcttatttgaatagattagtaaagttaggttataaagtagcaatttgtgagcagttggaaacaccagaagaagcaaagaagagaggttataaagctttagtaaaacgtgatgttgtaagaattgttactccaggtactatattagaagattctttgcttgaagcaaaagagaataattatttatgttgtatagttaatgttaatgataactatgctattgcatggttagaattatctactggattgtttcattataatacaacagacttacgtaagattgatagtgatttattgagaattaatccaaaggaagttttgatttctgataaattagtagagttagatttgatatattctactttaaaaaagtataaattttctataactcagtattccagtagtttttttgatacaagtaggtcttataatactttatgtagtgtttatggaatctctactttaaagggattaggtgatttaaaagatgaagagatagctgtatgtggttctttattagaatatgttaaagccacgcaaaaaggtaatttacctaaattagagtttcctaaggcttatggagatcgtgattttatgtttatagatgctgcagcattgagaaatcttgagttatttaatacacagtctggggatttggaaggctcattgatttcctctatagattatacaattacagcatgtggtggaagattgttaaaacgatgtttatctgctcctttagcgtgttcttatgcgataaatcgtaggttagacatagttgaattttttgtgaataataaagttttgtataaaaatgttagggaaacgttaagaggtattgctgatatagaacgtattttgaccagagtcaaggttggtagatgttctcctaaagacttgtatgctttaaagttaacattagataagacgtgtatattagttaatttgctaagtaagtttgatactagtgttgtgagtgatttttgtacaagattgggaagatatgatgatttatgtaaaactcttagtaatgtattaataccaaacaatgttagtaacgttaaagatggtggctttattaagcctgattatgatgtacaattgtcagagtatatatatattcaaaattatagtaataatttgattcaagaattgcgagataaatatcgtaatattaccaatattcaaaatttaaaaatattatataataatattttaggttattatgttgaagtttcagcaaaccatttaattaatgataaagactttattcacaggcagactctagctaatagtatcaggtatacaacaagtgaactaaaagcattagaaagcaaaataatttctgctagagatgcagcaattagtttagaggtaaagatttttggtcagttgtgtacacgtattattgagcatgcagatgaaattactatgactgctcatgctgtttcagaaatagatatgttaacttcttttgctgagttagcaatacaatattcttatactagacctgtagttgatgatagttatgaatttaatattcaaaaaggtaggcatcctgtggttgagcgcaatggtaaatttgttgctaacgatattgaccttgcacaaatgcaaagagtacatttaataactggacctaatatggctggtaagagtacttttttgagacaaaatgcacttataggtattttagcacatattggttcatttgttcctgcgtatagtgctcatataggagttattgataaaatatttagtagagttggagcttctgataatattgcatttggctattctacatttatggtagagatgacagaaactgctgcaataattaatcaagctacagataaatcttttgtaatacttgatgaaattggtagaggaactggaacgtatgatggtttgtcaattgcatggtcggttattgagcagatccacaatgttaataaaagtagagcaatttttgcaactcattatcatgagttatcgaaattagacgaatgtttagagaatataaagtgtttctgtatgaaagtggaagaatggaatggtaaggttgtatttttacatgaaattatacctggatcaactaataagtcttacggaatacatgttgcaaagttagcagggtttccgcagtctgtcctagacagagcagaagatctgatgaataagttaaaagcaaatgaagatttgttgacttag

SEQ ID NO: 4159 - protein, 804 aa, Ehrlichia canis
MNHDRKITPIMQQYMMLKNQYKECLLFYRLGDFYELFFDDAIETSKVLNIVLTKKGNVPMCGVPFHSSESYLNRLVKLGYKVAICEQLETPEEAKKRGYKALVKRDVVRIVTPGTILEDSLLEAKENNYLCCIVNVNDNYAIAWLELSTGLFHYNTTDLRKIDSDLLRINPKEVLISDKLVELDLIYSTLKKYKFSITQYSSSFFDTSRSYNTLCSVYGISTLKGLGDLKDEEIAVCGSLLEYVKATQKGNLPKLEFPKAYGDRDFMFIDAAALRNLELFNTQSGDLEGSLISSIDYTITACGGRLLKRCLSAPLACSYAINRRLDIVEFFVNNKVLYKNVRETLRGIADIERILTRVKVGRCSPKDLYALKLTLDKTCILVNLLSKFDTSVVSDFCTRLGRYDDLCKTLSNVLIPNNVSNVKDGGFIKPDYDVQLSEYIYIQNYSNNLIQELRDKYRNITNIQNLKILYNNILGYYVEVSANHLINDKDFIHRQTLANSIRYTTSELKALESKIISARDAAISLEVKIFGQLCTRIIEHADEITMTAHAVSEIDMLTSFAELAIQYSYTRPVVDDSYEFNIQKGRHPVVERNGKFVANDIDLAQMQRVHLITGPNMAGKSTFLRQNALIGILAHIGSFVPAYSAHIGVIDKIFSRVGASDNIAFGYSTFMVEMTETAAIINQATDKSFVILDEIGRGTGTYDGLSIAWSVIEQIHNVNKSRAIFATHYHELSKLDECLENIKCFCMKVEEWNGKVVFLHEIIPGSTNKSYGIHVAKLAGFPQSVLDRAEDLMNKLKANEDLLT

SEQ ID NO: 4160 - DNA, 2415 bp, Ehrlichia chaffeensis
  CDS (1)..(2415): transl_table=11
gtgaatcatgatagcaagataacccctataatgcagcagtacatgatgctgaagagtcaatataaggagtatttattattttatagattaggtgatttttatgagttattttttgatgatgcaatagagacgtctagaatattaaatattgtattaactaaaaaggggaatgtacctatgtgtggtgttccctttcatagtagtgaatcttatttaaatagattggtaaaattaggttataagatagcaatttgtgagcagttagaaacgtcagaagaagctaagaaaagaggatataaggctttagtaaaacgtgatgttgtaagaatagttactccagggactatattagaggattctttacttgaagcaaaagagaataattatttatcttgtatagttaatgttgaccataattatgctattgcatggttggaattgtctactgggttattttattatcatacaacagaattgcataagcttgatagtgatttgttcagaattaatcccaaggaagttttgatttctgataagttagtggaattggattctatatattctattttaaggaaatacaaattttcggtgacacaatattcgggtagtttttttgatgtgagtagatcctataatactttgtgtaatgtttatggaatatctactttaaaaggattaggtgatttaaaaaatgaagagatagcagtatgtggttctttgttggaatatgttaaagctacgcaaaaagggaatctacctcagttggaatttccaaaagcttattcaaagggtgattttatgtttatagatgcagcagcattaaggaaccttgagttattttgtacacaatctggagatttagaaggatccttaatttcttctatagattatactattacagcatgtggtggaagattattaaaacgatgtttgtcagctcctttagcatgttctcatgcaataaatcgtaggttagatattgttgagttttttgtaaatgatagaacattgtgtaggggtgttagggaaacattacgtggtattgcagatatagagcgtattttaacaagaattaaagttggtaaatgttcacctaaggatttatatgctctgaagttaactttggacaaaatttttgtattattagatttattgcataagtttgattctagtgttgtaggtgatttttgttcaaggttgggtaaatatgatgatttgtgtaaaacgcttgatgatgtgttaataccgaataatgttaataatgttaaagatgggggatttattaatcctgactatgatgcacaattgtcagaatatatatatattcaaagttatagtaatgatttaattcaagaattacgggataagtaccgtaatattactaatattcaaagtttaaaaatattgtataacaatattttaggttattatgttgaagtttcatcaagctatttgattagtgataaagactttattcataggcaaactctagcaaatagtattagatatacgacaagtgaattaaaagcattggaaagtaaaataatttctgctagggatgcagcgattaatttggaagtaaaaatttttggtcaattatgtacatgtattattgaagttgcagataaaatcactatgactgcacatgctattgctgaaattgatatgctaacttcttttgctgagttggcaatacaatattcttatactaaacctatagttgatgatagttatgaatttaacataaaaaaaggtaggcatcctgtggttgaacgtaatgggaaatttgtagctaatgatattgacctttcattaatgcaaagagtacatttaatcactggacctaatatggctggtaaaagtactttcttaagacagaatgcattgataggtattttagcgcatattggatcatttgttcctgctcaacatgctcatataggagttattgataaagtatttagtagagtaggggcttctgataatattgcatctgggcattctacgtttatggtagaaatgacagaaactgctgcaataatcaatcaagccacagataaatcttttgtaatacttgatgaaattggtaggggtacaggaacatatgatggattatcaatagcatggtcggttattgaacaaattcataatgttaacaagagtagagcaatttttgcaacccattatcatgaattgtcaaagttagataggtatttagaaaatataaagtgtttttgtatgaaagtagaagaatggaatggaaaagtagtgttcttgcatgaaattatacctggatcaactaataaatcttatggaatacatgttgcaaaattagcaggattcccacaatcagtcctagatagggcagaagatttaatgagtaaattaaaagcaaatgaggatttattaacttag

SEQ ID NO: 4161 - protein, 804 aa, Ehrlichia chaffeensis
MNHDSKITPIMQQYMMLKSQYKEYLLFYRLGDFYELFFDDAIETSRILNIVLTKKGNVPMCGVPFHSSESYLNRLVKLGYKIAICEQLETSEEAKKRGYKALVKRDVVRIVTPGTILEDSLLEAKENNYLSCIVNVDHNYAIAWLELSTGLFYYHTTELHKLDSDLFRINPKEVLISDKLVELDSIYSILRKYKFSVTQYSGSFFDVSRSYNTLCNVYGISTLKGLGDLKNEEIAVCGSLLEYVKATQKGNLPQLEFPKAYSKGDFMFIDAAALRNLELFCTQSGDLEGSLISSIDYTITACGGRLLKRCLSAPLACSHAINRRLDIVEFFVNDRTLCRGVRETLRGIADIERILTRIKVGKCSPKDLYALKLTLDKIFVLLDLLHKFDSSVVGDFCSRLGKYDDLCKTLDDVLIPNNVNNVKDGGFINPDYDAQLSEYIYIQSYSNDLIQELRDKYRNITNIQSLKILYNNILGYYVEVSSSYLISDKDFIHRQTLANSIRYTTSELKALESKIISARDAAINLEVKIFGQLCTCIIEVADKITMTAHAIAEIDMLTSFAELAIQYSYTKPIVDDSYEFNIKKGRHPVVERNGKFVANDIDLSLMQRVHLITGPNMAGKSTFLRQNALIGILAHIGSFVPAQHAHIGVIDKVFSRVGASDNIASGHSTFMVEMTETAAIINQATDKSFVILDEIGRGTGTYDGLSIAWSVIEQIHNVNKSRAIFATHYHELSKLDRYLENIKCFCMKVEEWNGKVVFLHEIIPGSTNKSYGIHVAKLAGFPQSVLDRAEDLMSKLKANEDLLT

SEQ ID NO: 4162 - DNA, 2415 bp, Ehrlichia ruminantium
  CDS (1)..(2415): transl_table=11
gtgactaatagtaacagtattactcctgtcatgcaacagtatgtaacacttaagcaacagtataaagagtatttgttattttatagattaggtgatttttatgaattgttttttgatgatgcaataaaaacatctaagatattaaatatagtattaactaaaaaaggtaacgtacctatgtgtggtgtgccttttcatagtagtgagacctatttaaataaactggtgaagttgggttataaaatagcaatttgtgaacagttagagacatcagaagaagctaggaaaagaggatataaatctttagtaaagcgtgatgttgtgagaattgttactcctggtactatagtagaagattctttacttgaagcaaaggaaagtaattacttagcttgtatagtaatgattaaagatagttgtgcaattgcatggttagagttatctactggattgttttgttatcatatgacttatatcagtaaacttgatagtgatttgttacgtattggtcctaaagaacttttggttgctgatgatttattagaaatagaagcagtatattctattatcaagaaatataggttttctataactcagtattcaagtagtttttttgacgaaaacagagcttataatacattatgtaatgtatatggtgtatctactttaaagggattaggtgatctaaaaggtgtagaaatttctgtatgtggttctttattggagtatgtaatagcaacacaaaaaggtagtttacctaagttaggatttccaaaagcatatgtacagagtgattttatgtttattgatgctgcagcattacgtaatttagaattgtttagtactcaatctggagaattagaaggatcgttgattgcatctatagactttactgttacagcatctggtggaagattattaaaaaggtgcttatcagctcctcttgcatctgctgatgctataaatcgtcgattgagtgttgttgaattttttgttaataatcaaaatttgtacaaaagtgttagacaagtattgcgaggtattgcagatatagagcgtattttaacacgagtgaaaattgcacggtgttcccctaaagatttgtattctttaaaattgacgttagagaaaacttgtgaattagttgaattgttatgtaagttcaatattgatattattagtgaattttgtttaagattaggaaggtatgaagatttaatttgtattcttaataattcactattacaaaatagtgtaagtagtgtaaaggatggtggatttattaatcctgagtgtgatgctcaattatctgaatacatatatattcaggagtgtagtaatcagctgattcaggagttacgtgatagatatcgcaatattactaatatccaaagcctgaaaatattatataataacattttagggtattatgttgaagtttcatcgaatcatttaattgatgataagaattttatccataggcaaagtctagctaataatgtcaggtatacaactactgagttaaaagagttagaaagcaaaataatatctgcaaaagatgcatctattagtttggaaatcaagatttttggtcagttatgttcagatgttattaaatatgcggataaaataactattactgctcatactattgctgaaatagatatgttaacttcttttgctgagttagctgtgcaatattcttatagtaaacctatcattgatgatagttatgagtttaatattaaaaaaggtaagcatcctgtagttgagcgaaatggtaaatttattgcaaatgatattaatctttcatcagaacagcgagtgcatctaattactggtcctaatatggcaggtaagagtacttttttgagacaaaatgcattaataggcattttagctcatattgggtcgtttgttcctgctgaatatgctcatataggagtgattgataaagtatttagtagagtaggtgcatctgataatattgtctgtggatattctacatttatggtagaaatgatagaaactgctgcagtaattaatcaagctactgaaagatcttttgtaatacttgatgagattggtagaggtacaggaacatatgatggtttatctattgcatggtcagttattgagcagatccataatgttaataagagtagagctatttttgcaacacattatcatgagttatcaaaattagataagtatttaaaacatataaagtgtttttgcatgaaagtagaagaatgggatgggaaagtagtgtttttacatgaaataatacctggtgcaagcgataagtcttatggaatacatgtagcaaaacttgcaggttttccacagtcggttgttaatagggcagaatacttaatggacaaattaaaaacaaatgaagatttattaacttaa

SEQ ID NO: 4163 - protein, 804 aa, Ehrlichia ruminantium
MTNSNSITPVMQQYVTLKQQYKEYLLFYRLGDFYELFFDDAIKTSKILNIVLTKKGNVPMCGVPFHSSETYLNKLVKLGYKIAICEQLETSEEARKRGYKSLVKRDVVRIVTPGTIVEDSLLEAKESNYLACIVMIKDSCAIAWLELSTGLFCYHMTYISKLDSDLLRIGPKELLVADDLLEIEAVYSIIKKYRFSITQYSSSFFDENRAYNTLCNVYGVSTLKGLGDLKGVEISVCGSLLEYVIATQKGSLPKLGFPKAYVQSDFMFIDAAALRNLELFSTQSGELEGSLIASIDFTVTASGGRLLKRCLSAPLASADAINRRLSVVEFFVNNQNLYKSVRQVLRGIADIERILTRVKIARCSPKDLYSLKLTLEKTCELVELLCKFNIDIISEFCLRLGRYEDLICILNNSLLQNSVSSVKDGGFINPECDAQLSEYIYIQECSNQLIQELRDRYRNITNIQSLKILYNNILGYYVEVSSNHLIDDKNFIHRQSLANNVRYTTTELKELESKIISAKDASISLEIKIFGQLCSDVIKYADKITITAHTIAEIDMLTSFAELAVQYSYSKPIIDDSYEFNIKKGKHPVVERNGKFIANDINLSSEQRVHLITGPNMAGKSTFLRQNALIGILAHIGSFVPAEYAHIGVIDKVFSRVGASDNIVCGYSTFMVEMIETAAVINQATERSFVILDEIGRGTGTYDGLSIAWSVIEQIHNVNKSRAIFATHYHELSKLDKYLKHIKCFCMKVEEWDGKVVFLHEIIPGASDKSYGIHVAKLAGFPQSVVNRAEYLMDKLKTNEDLLT

SEQ ID NO: 4164 - DNA, 2565 bp, Erwinia carotovora subsp. atroseptica
  CDS (1)..(2565): transl_table=11
atgaaagagtctgaaggcatagacctatcaacacacacgcctatgatgcagcagtattttaggttaaaggctgaacatccggaaatcctgctgttttaccgtatgggcgatttttacgagctgttctttgacgatgccaagcgggcttctcaactgctggatatttcgctgacgaaacgcggcgcttccgcaggggaaccgatcccgatggcgggcgttcctcaccatgccgttgaaaactaccttgccagactggtgcaaatgggcgaatccgtcgcgatctgtgaacagatcggcgatcccgccaccagcaaagggccagtggaacgtaaagtcgtgcgtatcgtcacgccaggaaccatcagcgacgaagcgctattgcaggaaaagcaggataacctgctggcagcaatctggcaggacggtcggggattcggttacgccacactagacatcagctctggacgctttcgcgtaagtgaacccgccgatcgggaaaccatggcggccgaattacagcgcaccaatccagcagagttactctacccagaatcctttgagtccatggagttgatcgacaatcgtcatgggctccgtcgtcgtccgatgtgggaatttgaacccgataccgcacgccagcagcttaacctgcaatttggtacccgcgatctgaccggttttggcgtagaacaggcaaagctcgcgctgcgagccgccggatgtttgctgcaatacgcgaaagacacacagcgcacctcgctgccgcatattcgtggcattacaatggagcgccaacaggatggcatcatcatggatgcggcaactcgccgtaaccttgaactgacgcaaaacctgtcaggcggcgtagaaaatacgctggctgccgtactggactgcaccgtaacagcgatgggcagccggatgctgaagcgctggattcacatgcctagccgcgatattgatgcgcttaagcagcgtcagcaggctatcagcgcattgcaggaaatcacaccggatctgcagccctacctgcggcaggtcggcgatctggagcgtattctggcgcgcctcgcgttgcgcacggcacgtccgcgcgatctggctcgaatgcgccatgctttccagcagtttcccgatatccgcgaacagcttgcgccgctggatactgattccgttcgccgtttggtcagccttattgggcaatttgatgaactacgcgatttgctggaacgcgccgttgtcgaagcaccgccagtccttgtacgcgacggcggcgttatcgcgccgggttaccatacggaactggatgagtggcgagcactggctgacggtgccagcgattatctggaccgtctggaaattcgtgaacgtgaaaaactggggcttgatacgctgaaagtcgggttcaatggtgtgcacggctattacattcaggtgagtcgaggccagagccatctggtgccgatccactatgtacgccgccagacgctgaaaaatgccgagcgctatatcattcccgagctgaaagaatacgaagacaaggttctgacctcgaagggcaaagcgctggcgctggaaaaagcactctacgatgagcttttcgacctactgttacctcatttagcggaactccagcaaagtgcggcagcactggccgagttggatgtcctgacgaatctggcggaacgcgccgatacgctgaattacgtctgtccgacgctgagtgacaaacccggcatcaaaatcgcaggtggtcgtcacccggtcgtcgaacaggtacttcgtgagccgtttatctcgaaccctctgtcactgtcaccacagcgtcgtatgctgatcattaccggccccaacatgggcggtaaaagtacctatatgcgtcaggcagcgctgattgtgctgatggcgcatatcggctgctttgtgccagcggatcaggcggtcattggtccggtcgatcgtattttcacccgcgtgggtgcagcagacgatctggcatctggtcgatccaccttcatggtagaaatgaccgaaacggcgaacatcctgcacaacgccacggaaaacagtctggtgctaatggacgaaatcggccgcggcacctcaacctatgacggtttgtcgctagcatgggcctgcgccgaaagtctggcaaaccgcatcaaagcgatgacactgtttgcaacgcactactttgagctgaccaccctgccggaaaaaatggaaggggtggtgaatgtccatttagatgcacgcgagcacggcgataccatcgcctttatgcacagcgtgcaggatggcgcagccagcaaaagttacgggcttgccgttgccgcattggcaggagtaccaaaagaagtgattaaacgcgcacgccagaaactgaaagagctggaaacgttgtcgaataatgcatcatccagccatatcgatggcgcgcagctagcgctgctgaacactgatgaaccgtcaccggcgattgaagcgctggaagccatcgatcctgatgcgcttacgccacgtcaggcgctggattggttgtatcagctaaagaaaatgctctaa

SEQ ID NO: 4165 - protein, 854 aa, Erwinia carotovora subsp. atroseptica
MKESEGIDLSTHTPMMQQYFRLKAEHPEILLFYRMGDFYELFFDDAKRASQLLDISLTKRGASAGEPIPMAGVPHHAVENYLARLVQMGESVAICEQIGDPATSKGPVERKVVRIVTPGTISDEALLQEKQDNLLAAIWQDGRGFGYATLDISSGRFRVSEPADRETMAAELQRTNPAELLYPESFESMELIDNRHGLRRRPMWEFEPDTARQQLNLQFGTRDLTGFGVEQAKLALRAAGCLLQYAKDTQRTSLPHIRGITMERQQDGIIMDAATRRNLELTQNLSGGVENTLAAVLDCTVTAMGSRMLKRWIHMPSRDIDALKQRQQAISALQEITPDLQPYLRQVGDLERILARLALRTARPRDLARMRHAFQQFPDIREQLAPLDTDSVRRLVSLIGQFDELRDLLERAVVEAPPVLVRDGGVIAPGYHTELDEWRALADGASDYLDRLEIREREKLGLDTLKVGFNGVHGYYIQVSRGQSHLVPIHYVRRQTLKNAERYIIPELKEYEDKVLTSKGKALALEKALYDELFDLLLPHLAELQQSAAALAELDVLTNLAERADTLNYVCPTLSDKPGIKIAGGRHPVVEQVLREPFISNPLSLSPQRRMLIITGPNMGGKSTYMRQAALIVLMAHIGCFVPADQAVIGPVDRIFTRVGAADDLASGRSTFMVEMTETANILHNATENSLVLMDEIGRGTSTYDGLSLAWACAESLANRIKAMTLFATHYFELTTLPEKMEGVVNVHLDAREHGDTIAFMHSVQDGAASKSYGLAVAALAGVPKEVIKRARQKLKELETLSNNASSSHIDGAQLALLNTDEPSPAIEALEAIDPDALTPRQALDWLYQLKKML

SEQ ID NO: 4166 - DNA, 2673 bp, Gloeobacter violaceus
  CDS (1)..(2673): transl_table=11
atggccgaccccgccactcaactctcccagtgggactttcgccgcttcgctcgatcggatctgaccccgatgctccagcagtacgtcgaggtcaaggcccagcatccccactgcctgctcctgtatcggatgggggatttttacgaaacgttcctggcggacgccgaaatcgtctcgcgcgagctggaaatcgtgcttaccggccgccaggcgggcgacaaaatcggccgcatcccgatggcggggattccccaccacgctctggagcgctactgcgcccaattgatcgaaaagggctacgcggtggtgatttgcgatcaagtcgaatcgcccgagcaggccaaagagcgcgcccggcaggcgaaagtcgctcgtcgcagcaagagcgacggcgacgcgccgctgttgcccctgctgctggaggacggcgagcagattgactgggaaggtgccgagagcgtcctggtgcgccgggcggtcacccgggtgctcacccccggtacggtgctcgaagatcagttgctggtgggacggcgcaataactatctggcggcgctggtgcaggcgggggagtgctggggattggccttcgcggacatttcgaccggcgaatttcaggtgacccagctggagagtgccgaggcactggtgcaggagttgttgcgcctgcagccggccgaagtgctcctgtccggcgacgcgcccgatccgctggtgctgctgcggcccggcgaggcttccagcgaacggcccgagtgcctgccgtcccagttttgctatacgctgcgtccccggcgttatttcgaattggacgaagcgcggcggttgctgatggaaacgttcggcgtgcgctcactcgaaggcttcggctgcgaaaatctgccgcttgccgtgcgggcggccggggggttggtgcagcatttgctggagacgcagcggggagtgtcgattcccctggagggcatccgcacctacaccctctcgcagtacctgattctcgatcaccagacccggcgcaacctcgaactgacccagaccgtgcgcgacggcgcgcagtacggctcgcttttgtgggcgctcgaccgcacccgcacggtgatgggggggcgcgccctcaggcgctggcttttgcagccgttgctcgatacgcgcgccatcggccgccgtcaggattcggtggccgagttgtacgacgaggggctgttgcgcgaacggctccagcgcattcttgaatcggtctacgacctggagcggctcgcgggacgctgcggttcgggcaccgccaacgcccgcgatctggtggctctgggcgaatcgctgctcaaattgcccgctctggccgaggcggtggccgcgagcaccagtccctacctcaaagcccttcaatccattcctgtcgaactggagcggcttggagagaagctgcgccgcacgctcgtggataccccgccgctcatcctcaccgagggcggtctgatccgggcgggcgtccacccggaactggaaggaatgcgcgggcaacttatcgaagatcgcgactggctggtggatctcgaagcgcgcgagcgcgcccgcacgggcatccagactctcaaggtgggctttaacaaagccttcggctactacctgtcgatctcgcgcggcaaggccgaaaaagcgccccccgagtacctgcgcaaacagaccctcaccaacgaggagcgctacatcacccccgaactcaaagagcgcgaaacccgcatcctcaacgcccagcagcagaccaaccagcttgagtacgatatttttaacatcctcaggcaggaggcgggccgtcacgtttcggctctgcggcaggtggcccggcgcgtggccgccctcgatgccctggccggtctggctgaggtggccgtctaccacgactattgccgtccggtgctcggcgaagggcgcgaggtgcacatcgaggcaggccgccaccctgtgatcgaacaggcgatcccggcgggttttttcgtgcctaacgacgcgcgcatgggagccgaagccgagccggacttgatcatcctcaccggcccgaacatgtccggcaaatcgagcttcatccgccaggtggcattgattcagctgttggcccaggtgggggcctttgtgcccgccaggggggctgtgctcggggtggccgatcgcatctttacgcgcgtgggagcggtcgacgatctggccaccggccaatcgaccttcatggtcgagatgaccgagacggcgaatatcctcaaccacgccaccccccgctcactggtcttgctcgatgaaatcggccgagggacggcgactttcgatgggctggccatcgcctgggcggtggctgagtacctggcaagccacatccgctgccggaccattttcgccacccactaccacgagctgaacgaactggcttcggtggtcagtggtgtcgccaattatcaggtgactgtgcaggaactggccgatcgaatcgtctttttgcaccgggtcacccccggcggggcggatcgctcctacggcatcgaggtgggccggttggccggattgccgccttcggtggtggcgcgggcgcgcacggtcctggcccaggtcgaacagcattcgcaaattgccgtgggcttgcgcgattctaacggcagcgcctccgagtcggccgctggctaa

SEQ ID NO: 4167 - protein, 890 aa, Gloeobacter violaceus
MADPATQLSQWDFRRFARSDLTPMLQQYVEVKAQHPHCLLLYRMGDFYETFLADAEIVSRELEIVLTGRQAGDKIGRIPMAGIPHHALERYCAQLIEKGYAVVICDQVESPEQAKERARQAKVARRSKSDGDAPLLPLLLEDGEQIDWEGAESVLVRRAVTRVLTPGTVLEDQLLVGRRNNYLAALVQAGECWGLAFADISTGEFQVTQLESAEALVQELLRLQPAEVLLSGDAPDPLVLLRPGEASSERPECLPSQFCYTLRPRRYFELDEARRLLMETFGVRSLEGFGCENLPLAVRAAGGLVQHLLETQRGVSIPLEGIRTYTLSQYLILDHQTRRNLELTQTVRDGAQYGSLLWALDRTRTVMGGRALRRWLLQPLLDTRAIGRRQDSVAELYDEGLLRERLQRILESVYDLERLAGRCGSGTANARDLVALGESLLKLPALAEAVAASTSPYLKALQSIPVELERLGEKLRRTLVDTPPLILTEGGLIRAGVHPELEGMRGQLIEDRDWLVDLEARERARTGIQTLKVGFNKAFGYYLSISRGKAEKAPPEYLRKQTLTNEERYITPELKERETRILNAQQQTNQLEYDIFNILRQEAGRHVSALRQVARRVAALDALAGLAEVAVYHDYCRPVLGEGREVHIEAGRHPVIEQAIPAGFFVPNDARMGAEAEPDLIILTGPNMSGKSSFIRQVALIQLLAQVGAFVPARGAVLGVADRIFTRVGAVDDLATGQSTFMVEMTETANILNHATPRSLVLLDEIGRGTATFDGLAIAWAVAEYLASHIRCRTIFATHYHELNELASVVSGVANYQVTVQELADRIVFLHRVTPGGADRSYGIEVGRLAGLPPSVVARARTVLAQVEQHSQIAVGLRDSNGSASESAAG

SEQ ID NO: 4168 - DNA, 2682 bp, Herminiimonas arsenicoxydans
  CDS (13)..(2682): transl_table=11
ttggaatccactatgtcgtcggcaagcacaaacgcaagtcctccctcagcaagcgaaaagcacacaccgatgatgcagcaatatctgcgcatcaaggctgagcatccggaaacgctgctgttttaccggatgggcgatttctacgaagtgtttttcgaggatgcggaaaaggcttcacgtctgctcggcatcacactgacgcaacgcggctcctctaacggcaatccgatcaagatggccggcgtgccttttcacgcggtcgatcaatatctttccaaactggtcaagctgggcgaatcgattgcgctgtgcgaacagataggcgatccggctaccagcaaggggccggtggagcgcaaggtattgcgcgtgattacaccgggcacactgagcgattccgatctgctgccggaaaaatccgagcagcctctgctcgcactgtatagcacgacgcagcgcaagacgatcactatcggcctggcctggctatcgatggcaagcggtgcgttgaagttgatggaattcaccaccgatgccaggaatgccgctacgcgtctgaagcatgaactcgaacgcattgcaccggccgaggttctattgccgggcagcatagacggcccggattccgattatgcgttcgcaaaaaacaccaccgtaccggactggcatttcgacatcgcacacggcagcaaggccttgcatgaacagctcaaggtgtccactcttaccggcttcggtgccgagcacctgaatgccgccatcggcgctgccggcgccttgctgcgttatgcgcaagccacgcagggcaaaggcctgcagcatgtacgcgcactcacggtagaaaccgaaaacgaattcatcggtctcgatgccgcgacccgccgtaatctggagttgaccgaaaccatacgcggccaggataacaattccgcgacgctgttttcgctgctggatcactgccgcacggcgatgggttcgcgcctgctgcggcactggctgcatcatgcgcgacgcgatcaggcagtcgcacgtgcgcgccatgccgcgatcaatgccctgatgcgcaccgatgcctgcaccggccttgcctccacgctggcatcggtaccggatgtcgaacgcattgccactcgcatcgcgctgcaatcggcgcgtccgcgcgatctggccggcatgcgcggcggcttgcagcaactaccttcattgcgcgcctacgtttcgatgtgcaatcaggatgccgatgcgccgttgctgaaaaccatacacgatgcgctcgccacgccgagcgaatgcctggatctggtggagcgcgcgattgcgctggagccagcagccatggtgcgcgacggcggcgtgattgcgcgcggtttcgatgcagaactggatgagttgcgtgggctgtcggaaaacgccgggcaattcctggtcgatctggaaacgcgcgaacgtacgcgtaccggcatcaataatctgcgcgtcgaatacaacaaggtgcacggtttctatatcgaagtcacacacggccagaccgacaaggtaccggacgattatcgccgtcgccagacgctgaaaaatgccgaacgctacatcacgccggaattgaaagcctttgaagacaaggccctgtcggcacaggagcgtgcgctggcgcgggaaaaatatttgtacgatcaggtgctgcagcagatggcgcaacatatcggcacactgcaaaacattgcccatgcgctggcacagctcgatacgctggtcgcacttgccgaacacgcattgcgacacaactggtgcgcaccgcaattgattgccgaaccgacgattgcaatagaacaggggcgccatccggtggtcgagaaccacatcgagcgctttatcgccaacgactgcctgctcaacaatgagtcacgtctgctattgatcaccggtcccaatatgggtggtaaatcgacctatatgcggcaggtcgcgctcatcaccctgctggcctatgtcggcagttttgtgccggccaccagcgccaccataggcccgatcgatcgcatcttcacacgcataggtgcagccgacgatctggctggcggtcgctcgaccttcatggtcgagatgacggaatcggcggccatcctcaacggcgccacggaaaactcactggtattaatggatgaagtcgggcgcggcacctccacctttgacggtctggcgctggcctgggccatcgccagacatttgattgacagcaccagaagctttaccctgttcgccacccattattttgaactgacgcagttgccggaggtccatccttctgcagccaacgtgcatttgtcggcagtggaacacaaggacagcatcgtgtttctgcacgccgtacaggccggtcctgcatcgcaaagttatggcctgcaggttgcgcaactggccggcgtaccgcaagcagtgatccgggccgcacgcaaacatctggccacgctggaagcgaattcgatgcaggctacgccgcagttcgatctgtttgccgaccccgatcacctgatcccgacctccgatgtggaaactgcaatggcgcagccatccgcgctggacgaagcgctggcggacatcaatccggacgcgctatcgccgcgcgacgcgctggatgcactttacagactcaaggagctgagcaatcagcacagggaaaaatga

SEQ ID NO: 4169 - protein, 889 aa, Herminiimonas arsenicoxydans
MSSASTNASPPSASEKHTPMMQQYLRIKAEHPETLLFYRMGDFYEVFFEDAEKASRLLGITLTQRGSSNGNPIKMAGVPFHAVDQYLSKLVKLGESIALCEQIGDPATSKGPVERKVLRVITPGTLSDSDLLPEKSEQPLLALYSTTQRKTITIGLAWLSMASGALKLMEFTTDARNAATRLKHELERIAPAEVLLPGSIDGPDSDYAFAKNTTVPDWHFDIAHGSKALHEQLKVSTLTGFGAEHLNAAIGAAGALLRYAQATQGKGLQHVRALTVETENEFIGLDAATRRNLELTETIRGQDNNSATLFSLLDHCRTAMGSRLLRHWLHHARRDQAVARARHAAINALMRTDACTGLASTLASVPDVERIATRIALQSARPRDLAGMRGGLQQLPSLRAYVSMCNQDADAPLLKTIHDALATPSECLDLVERAIALEPAAMVRDGGVIARGFDAELDELRGLSENAGQFLVDLETRERTRTGINNLRVEYNKVHGFYIEVTHGQTDKVPDDYRRRQTLKNAERYITPELKAFEDKALSAQERALAREKYLYDQVLQQMAQHIGTLQNIAHALAQLDTLVALAEHALRHNWCAPQLIAEPTIAIEQGRHPVVENHIERFIANDCLLNNESRLLLITGPNMGGKSTYMRQVALITLLAYVGSFVPATSATIGPIDRIFTRIGAADDLAGGRSTFMVEMTESAAILNGATENSLVLMDEVGRGTSTFDGLALAWAIARHLIDSTRSFTLFATHYFELTQLPEVHPSAANVHLSAVEHKDSIVFLHAVQAGPASQSYGLQVAQLAGVPQAVIRAARKHLATLEANSMQATPQFDLFADPDHLIPTSDVETAMAQPSALDEALADINPDALSPRDALDALYRLKELSNQHREK

SEQ ID NO: 4170 - DNA, 2673 bp, Hyphomonas neptunium
  CDS (1)..(2673): transl_table=11
atgccagacacagcccgcccttccgccaccacagaacctacgcccttcatggcgcagtatctgtcgatcaaagcagagcatcccggcgctctgctgttctttcgcatgggcgatttctacgagctgttcttccaggatgccgtagaggcagccagcatcctcgacattaccctcacttcccgcggcgagcatgacggcaagcccattccgatggcaggggtgccctatcatgcagcagaggggtatctcgcccgcctgatcaaaggggggtgccgcgtcgctgtctgcgagcagatggaaacgcccgccgaggccaagaagcgcggatcgaagtcgatcgtccagcgcggcgtggtgcggatcgtgacgcccggcaccctcaccgaagacgcgctgctgccggcccgccaagggcaggcgctcgcggccatcgctttttcgggtgcgggggaggcggcgctcgcggtctgcgatgtctcgaccggcgcctttgatctcaccgccattccggccgcgcgcctgggcgaggcgctcctcgcctggcccctcagcgaactggtcatctcagccgacgacgcagaccgccccctcattcttgaggcgcggggcttcctcagcgccccaatcaccgagcgtcccggccgcgcggccaccgctaaatccggcgaagccctgctgaaggaagtctttgggttggccgcgctcgattcactgggcgatttcagccgggtcgagttcgccgccgccggattgttgcttgattatgtaaagcttacccaggcgggcgcgccgatccgtctgcgcgcgccgcgccgccccgataccggcggcatccttttgatcgatccggcaacccgcgccagcctggagatagaccgcagcatcagcggtggccgggatggcacactgcttgcggtgattgaccggacagtcaccgcgcccggtgcccgcctcctggccgcgcgcctggcccgtccctcgcgcagcgtgtcggaaatcacttcacgctatgatgccgtatcccatcttctgggcgatgcgggtcagctggaagatgtgcgtgtgcggctgaaatccgcgcctgaccttgagcgcgcagtcatgcgcctcaaccttggccggggtggcccgcgcgacatggcggcgctttccaaagcggttttgtcgggcgcagaagccgccggcgtgctcgggcgggggctgcccccacgccttgctgaggttgccgaaacgctcggcctatccggcgcgccgtccgtgcgcgcgttcgcggaagatctcgcccgcgcgttgaccgaagcgcctccaatgcttgcccgcgatggcgggttcattgcgcaggggtgggatgtcgcccttgacgaggtccgtgcgctgagggatggcagccgccgcgtcatcgcagagcttcaggcaaaatatgcagaccagaccggcatcaacgccctcaaggtcaagttcaacaatgtgctgggctatttcatcgaagtgcccgccgccaaggcagacccgatgctgcgcgcgccgctctcggccgactttatccatcgccagaccatggccggcgccgtgcggttctccacgcacgagctcgctgatcttgccggccgaatcgggcgggcagaggacgaagccaaagcccgcgaaatcgccatcttcgaagccttctgcgcaaaagtggaggagttgaccgggccgctggccgtaatcgcggccgctttggcggagctggacgtcgccgcaagtcatgccgtctgggcggcagagaccggcgcggtgcggcctgcgcttgatccacgtccggtgtttgaagccaaaggcctgcgccacccggtcgtcgaagcggcgctgcgcaaggaagggaaggggtttaccgccaatgaccttcatctcgatgcggagggaaatgaaggcgcgcgtttcctcctcgtcaccggcccgaacatggcgggtaagtctacttatctgcgccagtcagcgctggccgtgatcctcgctcaggcaggcgcctttgttccggccgcctcgctgcggcttggtctttctgaccgggtcttttcccgcgtcggtgcgtcggacgatctggcgcgcggacgctccacattcatggtcgagatggtggagaccgccgccatcctcaatcaggcaacgccggaaagctttgtgatcctcgatgaagtgggtcgcggcacagccacctgggatggtctcgccatcgcttgggcggcggccgaacatcttcacgatacgaacagatgtcgcgccatcttcgccactcactatcatgagttgaccgacctggctgcgcggatgcccgccgcctcaaacgcctcgctgaaagcccgcgaatggaagcaggacctgatcttcctgcacgaagtccagcccggtccggcggaccgctcctatggcgtgcaggtggcaaagctggccggtcttccccgcgcggcggtagcgcgcgcggggcagatcctcaagaaactggaagccggtccctcggcctcggaaaaccttccgctgttcgcgatggtggccgaagatccggccccggagttttcgccggagagctctgccgtgattgaagcgcttgccgccgctgatcccgacagcctcacgccgcgcgaagcgctcgatcttgtttaccgcctgaaagacctgagccgaggcgcctag

SEQ ID NO: 4171 - protein, 890 aa, Hyphomonas neptunium
MPDTARPSATTEPTPFMAQYLSIKAEHPGALLFFRMGDFYELFFQDAVEAASILDITLTSRGEHDGKPIPMAGVPYHAAEGYLARLIKGGCRVAVCEQMETPAEAKKRGSKSIVQRGVVRIVTPGTLTEDALLPARQGQALAAIAFSGAGEAALAVCDVSTGAFDLTAIPAARLGEALLAWPLSELVISADDADRPLILEARGFLSAPITERPGRAATAKSGEALLKEVFGLAALDSLGDFSRVEFAAAGLLLDYVKLTQAGAPIRLRAPRRPDTGGILLIDPATRASLEIDRSISGGRDGTLLAVIDRTVTAPGARLLAARLARPSRSVSEITSRYDAVSHLLGDAGQLEDVRVRLKSAPDLERAVMRLNLGRGGPRDMAALSKAVLSGAEAAGVLGRGLPPRLAEVAETLGLSGAPSVRAFAEDLARALTEAPPMLARDGGFIAQGWDVALDEVRALRDGSRRVIAELQAKYADQTGINALKVKFNNVLGYFIEVPAAKADPMLRAPLSADFIHRQTMAGAVRFSTHELADLAGRIGRAEDEAKAREIAIFEAFCAKVEELTGPLAVIAAALAELDVAASHAVWAAETGAVRPALDPRPVFEAKGLRHPVVEAALRKEGKGFTANDLHLDAEGNEGARFLLVTGPNMAGKSTYLRQSALAVILAQAGAFVPAASLRLGLSDRVFSRVGASDDLARGRSTFMVEMVETAAILNQATPESFVILDEVGRGTATWDGLAIAWAAAEHLHDTNRCRAIFATHYHELTDLAARMPAASNASLKAREWKQDLIFLHEVQPGPADRSYGVQVAKLAGLPRAAVARAGQILKKLEAGPSASENLPLFAMVAEDPAPEFSPESSAVIEALAAADPDSLTPREALDLVYRLKDLSRGA

SEQ ID NO: 4172 - DNA, 2616 bp, Idiomarina loihiensis
  CDS (1)..(2616): transl_table=11
atgcctgaattctctgataaacagatccaatcacataccccaatgatgcagcaatacctacggataaaagcggagcatgctgacatgcttttattctatcgtatgggggacttttacgaactgttttttgaagacgcgaaacgctcagcccaactgttagatatctccctcacagcgcggggtcagagtaatggtgaacctattccaatggcaggtgttccctatcacgcagtagaaaactatctggcgcgcctggtcaatatgggcgaatccgttgccatctgcgaacaaattggcgatccggcaaccagcaaaggtccggttgaaagaaaagtcgtgcgtattgtcacgccgggaaccgtcactgacgagtcgctgttagcggaaaaaaggcaaaatctgttagttgcgatttgtccgctgaatccaaaacagccggaagcggaatacgcaatatccagtctggagctaagtagcggccgtttctggctaaccaaagctcattccagtgaacaactggctgcagaaatgcagcgtttagagccagccgaattgctctatcctgagtctatttccttggccggactacctttagcaaaagcgaaatgcaaacgccgaccggcctgggagtttgaacaacaaaccgcttttatgctgcttactcgccagtttggcactcagcatttagaaggcttcggtatcaaaaataatgagcctaccctggcagccgccggtgctattctgcattatgtaaaagaaactcaacgcgccgccctgcctcacattcaggcgctaataacggaacatccgcaagacgctattattctcgacgcagcaacacgcagaaaccttgagctgcagcaaagcatgggcgaaggcgatacacacctttcagctgtactggacaaaaccgtttcagctatgggaagccgccagttccagcgttggctgcagcgccctattcggaaccatcaggaacttaaccagcgttatgatgctgtcgacgcattaaaagaaaatctgaattttgaaaatatacagctaacattaaaacagttagccgatattgaacgtattgttgcccgtgtgggcttacgaagcgcgcgtccgaaagactttgcacgcttgcgcgacagcctggctaaaataccggaagtcagagcgtctttatctcaccgttcgctgagttatctgcacgacattattgaaccctttccagaagtggtcgacttgctgactaaagccgttattgagcagccacctttattgattcgcgacggcggtgttattgccgaaggatacgacaaggaactcgatgaattgcgcgatcttgcaacgggtgctaccgactacctgaaacaactggagcagcgtgaacgtgagagaagtggtatcgccacattaaaagttggctataacagagttcacggctactttattgaggtcagccggcagtcgtcagaagcggtacccgatgactatcagcgtcgccagacactaaaaaatacagagcgctatattattccagagttaaaggagcacgaagacaaagttctgaatgctcaggcgcgttctctggccagagaaaaatggctttacgaccaactctttgagcacttactgccgcaggtgactgcattgcaaaaaagtgcttcgggtctggctcaactcgataccttgtgctgttttgcacggctggctgacaattatcgttattgccgcccgcaactgcaaaaggaaaccagcttaattgaactggaagctgcccgtcatccggttattgaacaactgagcgatgagccttttattgctaaccccatgtcgctgacgccgcagcagcgcatgctgatgataaccggccctaacatgggtggtaaatcgacttacatgcgacaagccgcgttaatcgttattttggcgcacatgggctgctacgtaccggctgataaggcaattattggcgacatcgaccgtatctttactcgtattggtgcctctgacgatttagcctcaggccgttcgacttttatggtagaaatgacagaaaccgcgaacattctgcataacgccacggcaaaaagcctggtgcttatggatgaaattggtcgtggcacttcaacttatgacggtttgtcactggcttggtcttgtgccgattacctgtcccgacaactccagtgcctgaccttattcgccactcattactttgagttaacggaattggcagaagagttaccagccacggtaaacgtgcatgttgatgcgaaagagcatggcgataccattgcttttttacataaagtcagccctggagcagccagccagagctttggcttgcaagtggctaaactggccggggttccggagcatgtcattcataaagcaaaacaaaagttgtccgaactggagcatactcaccatggtggtttaaacgaacccaaacaagccactatggagctcactcctccacctgaagctatcccgtctcatacagaaaaacgcaacccactgcttgatgagctggaacaactggacattaatgatctgactccgaagcaggcgctggatattctttaccaatggcaacagaaacaaaaaggctcaacacaaagttga

SEQ ID NO: 4173 - protein, 871 aa, Idiomarina loihiensis
MPEFSDKQIQSHTPMMQQYLRIKAEHADMLLFYRMGDFYELFFEDAKRSAQLLDISLTARGQSNGEPIPMAGVPYHAVENYLARLVNMGESVAICEQIGDPATSKGPVERKVVRIVTPGTVTDESLLAEKRQNLLVAICPLNPKQPEAEYAISSLELSSGRFWLTKAHSSEQLAAEMQRLEPAELLYPESISLAGLPLAKAKCKRRPAWEFEQQTAFMLLTRQFGTQHLEGFGIKNNEPTLAAAGAILHYVKETQRAALPHIQALITEHPQDAIILDAATRRNLELQQSMGEGDTHLSAVLDKTVSAMGSRQFQRWLQRPIRNHQELNQRYDAVDALKENLNFENIQLTLKQLADIERIVARVGLRSARPKDFARLRDSLAKIPEVRASLSHRSLSYLHDIIEPFPEVVDLLTKAVIEQPPLLIRDGGVIAEGYDKELDELRDLATGATDYLKQLEQRERERSGIATLKVGYNRVHGYFIEVSRQSSEAVPDDYQRRQTLKNTERYIIPELKEHEDKVLNAQARSLAREKWLYDQLFEHLLPQVTALQKSASGLAQLDTLCCFARLADNYRYCRPQLQKETSLIELEAARHPVIEQLSDEPFIANPMSLTPQQRMLMITGPNMGGKSTYMRQAALIVILAHMGCYVPADKAIIGDIDRIFTRIGASDDLASGRSTFMVEMTETANILHNATAKSLVLMDEIGRGTSTYDGLSLAWSCADYLSRQLQCLTLFATHYFELTELAEELPATVNVHVDAKEHGDTIAFLHKVSPGAASQSFGLQVAKLAGVPEHVIHKAKQKLSELEHTHHGGLNEPKQATMELTPPPEAIPSHTEKRNPLLDELEQLDINDLTPKQALDILYQWQQKQKGSTQS

SEQ ID NO: 4174 - DNA, 2562 bp, Klebsiella pneumoniae subsp. pneumoniae
  CDS (1)..(2562): transl_table=11
atgagcacaattgacaatctcgacgcccacacgccgatgatgcagcagtatctcaagctaaaggcgcaacatcctgacattctgctgttttaccggatgggggatttttacgagctattttatgacgatgcgaaacgcgcctcgcagctgctcgatatctcgctgaccaagcgcggcgcctccgcgggcgaaccgatacccatggccggcatcccccaccacgccgtagagaactacctcgccaaactggtcaatcagggcgagtcggtggccatttgcgagcagattggcgacccggccaccaccaaggggccggtcgagcgtaaagtggtgcgtatcgtcaccccgggcaccattagcgatgaagcgctgctgcaggagcgccaggacaacctgctggccgccatctggcaggacagcaaaggcttcggctacgcgacgctggatatcagctccgggcgctttcgtctgagcgaaccggccgaccgcgaaaccatggcggcagagctgcaacgcaccaacccggcggaactgctgtatgcggaagattttgccgaatcgtcgctgatcgagggccgccgcggtctgcgccgtcgcccgctgtgggaatttgaaatcgacaccgcgcgccagcagctaaacctgcagttcggcacccgcgatctggtcggcttcggcgtcgaaaacgccccgcgcggcctgtgcgccgccggctgcctgctgcagtatgtcaaagacacccagcgtacctcgctgccgcacatccgctccatcaccatggaacgccagcaggacagcatcattatggatgccgccacccgccgtaacctcgagatcacccagaatctggccggcggcaccgacaacaccctggcctcggtactcgactgtacggtgacgccgatgggtagccggatgctcaagcgctggctgcatatgccggtccgcgataccgccgtgctggtggagcgccagcagaccatcggcgcgctgcaggagcgctataccgagctgcagccggtgctgcgccaggtcggcgatctggagcgtattctggcgcgtctggcgctgcgtaccgcgcggccgcgcgatcttgcccgcatgcgtcatgccctgcagcaactgcctctgctgcgtgagctgctggccgacgttgacagtcagccggtgcaaaaattgcgcgagaaaatgggcgagttcaccgaactgcgcgaactgctggagcgtgcggtgatcgacgccccgccggtgttggtccgcgacggcggggtcatcgccccgggctatagcgaagagctggacgagtggcgggcgctggccgatggcgccaccgattatctcgataagctggagatccgcgagcgcgagcggctgggcctcgataccctgaaagtcggctacaacgccgtccacggctactacatccagatcagccgcggccagagccacctcgcgccgatccactacgtgcgccgccagacgctgaaaaacgccgaacgctatattattcctgagctgaaggaatacgaagataaggtgctgacctccaagggcaaagcgctggcgctggaaaaacagctttatgacgaactgttcgacctgctgctgccgcatctcgccgatctgcaaaccagcgccagcgcgctggccgagctggacgtgctggtcaacctggcggaacgcgcggaaaccctgaactactgctgcccgacctttagcgataagccaggcattcgcattagcgaaggccgccatccggtggtcgagcaggtgctgaaagagccgtttatcgctaacccgctgcagctggcgccgcagcggcggatgctgatcattaccgggccgaacatgggcggtaaaagtacctatatgcgccagaccgcgctaattgcgctactggcctatatcggcagctacgtcccggcgcagaaggtggagatcgggcccatcgatcgcatcttcacccgcgtcggcgcggcggatgacctggccagcggccgctcgacctttatggtggagatgactgaaaccgccaatatcctgcacaatgccaccgagcatagcctggtgctgatggatgagattggccgcggcacgtccacctacgacgggctatcgctggcgtgggcctgtgcggaaaatctggccaacaaaatcaaggcgctgacgctgttcgccacccactacttcgagctcacccagctgccggagaaaatggaaggcgtcgccaacgtccacctcgacgcgctggagcacggcgataccatcgcctttatgcacagcgtgcaggacggcgcggccagcaagagctatggcctggcggtcgccgcgctggcgggggtgccgaaagaggtgatcaagcgcgcgcggcagaaactgcgcgagctggagagtatctcgcccaacgcggcggcgacccaggtcgacggcacgcagatgtcgctactcgccgccccggaagagacctcgcctgcggttgaggcgctggagaatcttgatccggactccctgaccccgcgtcaggcgctggagtggatctaccgtctgaaaagcctggtctag

SEQ ID NO: 4175 - protein, 853 aa, Klebsiella pneumoniae subsp. pneumoniae
MSTIDNLDAHTPMMQQYLKLKAQHPDILLFYRMGDFYELFYDDAKRASQLLDISLTKRGASAGEPIPMAGIPHHAVENYLAKLVNQGESVAICEQIGDPATTKGPVERKVVRIVTPGTISDEALLQERQDNLLAAIWQDSKGFGYATLDISSGRFRLSEPADRETMAAELQRTNPAELLYAEDFAESSLIEGRRGLRRRPLWEFEIDTARQQLNLQFGTRDLVGFGVENAPRGLCAAGCLLQYVKDTQRTSLPHIRSITMERQQDSIIMDAATRRNLEITQNLAGGTDNTLASVLDCTVTPMGSRMLKRWLHMPVRDTAVLVERQQTIGALQERYTELQPVLRQVGDLERILARLALRTARPRDLARMRHALQQLPLLRELLADVDSQPVQKLREKMGEFTELRELLERAVIDAPPVLVRDGGVIAPGYSEELDEWRALADGATDYLDKLEIRERERLGLDTLKVGYNAVHGYYIQISRGQSHLAPIHYVRRQTLKNAERYIIPELKEYEDKVLTSKGKALALEKQLYDELFDLLLPHLADLQTSASALAELDVLVNLAERAETLNYCCPTFSDKPGIRISEGRHPVVEQVLKEPFIANPLQLAPQRRMLIITGPNMGGKSTYMRQTALIALLAYIGSYVPAQKVEIGPIDRIFTRVGAADDLASGRSTFMVEMTETANILHNATEHSLVLMDEIGRGTSTYDGLSLAWACAENLANKIKALTLFATHYFELTQLPEKMEGVANVHLDALEHGDTIAFMHSVQDGAASKSYGLAVAALAGVPKEVIKRARQKLRELESISPNAAATQVDGTQMSLLAAPEETSPAVEALENLDPDSLTPRQALEWIYRLKSLV

SEQ ID NO: 4176 - DNA, 2607 bp, Magnetococcus sp
  CDS (1)..(2607): transl_table=11
atgagcagccccaaacagacccccatgatcgcccagtatctgagcatcaaggccgcccatccggagaccttgctgttttttcgtatgggggatttttacgagctgttttttgacgatgccaaacaagcagctgaggcattgaacattgcgcttacctctcgcggcaagtcagagggagagcctatccccatggcaggaatccctgtccatgcgcgccaaacctatttaaacaagctgattgaagccggttttaaagttgccatttgtgagcagatggagccaccgggcgcctctaaagggccggtacgccgcgaggtggtgcgcactgtcacccctggcaccctaaccgaagagagcctgcttagcccccgcgaaaacaactatctggtcagttatctccccgcagccaagcgtcacccccacgctttggctgccctggatctttccaccggtgagttttttgctctgaccttggaaagagaagatcaagtcgccgctgagctgtcccgcctagagcccgccgaactgctgatccccgacaactgggagccagagccatggctcaaggggtggaaacgctgtctgtcgcgtcgaggttcctggtcttttgatggcaaagagggggcccgggtccttttagaacattttcaggtcaccagtttagaaagttttggcgtggcagatagtcccccctgtttaggggtgtgtggtgccctcctccactattgccgcgaaacccaaaaagaggcgctttcccatatcactggcttgtcccgcctgcatcagcaagagggcatggtgctggatgaaacctgccgtcgtaacctagagcttaactataaccttaaggatggcagccgcaaaagcagcctgcttggggtgatggatcgctgtattacccccatgggtagccgtctgctggcgcagtggatcaaccgtccattgcaatctctggacgccattgccacccgtcaagagagcgtctcctggttgcgggaaaatttggttgcttaccaggatctgcgtgaacggctgcgcatggtccacgatctggaacgctttttaagccgtattgcgctacgccgggccagccctcgggatctgggaggactccgccaaacgctgcaatgtctgccccagctctacgccatccttaccccagctgacgggcacagcctcgcggtacccagcctactacgcatcttggccgaccattttaatggccacgaggcgcttaccaagcagcttgagcagcagttggccgatgagctaccgttaaaccttaaagagggagagaccattcgtctggggtttgatcaaaccttagacaccctgcgcagcctcagccgcgatggcaaaagctatcttaccaagctggaggtagaagagcgggagaaaaccggcatcccctcgcttaaaatcaaataccatcgcagcttcggttacagcatggaggtgacaaaaacccatttggacaaggttcccccgcgctatatccagcgtcagaccatgaccaatggtgttcgttatgtcaccgaagagcttaaagagtatgaagagcagctgcttaccgccgaagagcgcatgttagagcgagagcagcttctgtttgaagcactggccgaacaggttgctcgccaagccgaaacactgcaagccagcgcccgtgccattgccaccctggatgtcttagccaattttgcgcacattgccgaggagcgcaactattgtcgcccgctgttgcatgagggggcggtgattgaaattaaccagggccggcatccggtggttgaacagttttccgacaccccttttgttgccaacgatatacgcttggataaccgccagcgtaccggcttgattaccggtcccaatatggcgggtaaatccaccctcatgcgtcaggttgcgctcattgtcctgctggcccacaccggggcgtgtgtaccggcgggttcggctaaaattgggcgggtggatcgcatcttcacccgtgttggggcgtcggacgatctggcgggggggcgctccacctttatggtggagatgaccgaaaccgcccacattttacaccatgccagcgagcgatctttggtgatattggatgaaattggccgaggcacatccacctacgatgggctctccatcgcctgggcggttgcggaacacatccacacccagtgccaagccagaaccctatttgccacccactatcatgagcttactcagttggagtcgcaattggatggggtgtttaatctcacggtggaggttaaggagtggaaagatcaaattctctttttgcacaccattgtgcggggagcggcggatcgtagttatggtattcatgtcgcccagttggcgggactaccccgtgccgtcacccgccgtgcgcgggaggtcttggcggatttagaggaacatgccgtgcaccatccagattccatggggcaaggccacgcccctgcctcccagccctatcagctcacgctttttgaggatgccccaccctcgccagccttattggaactcaagcgtgtcgatcccgacgaattgacgcccaaagaggcgttggaagccctttataggctcaaggagttattgtaa

SEQ ID NO: 4177 - protein, 868 aa, Magnetococcus sp
MSSPKQTPMIAQYLSIKAAHPETLLFFRMGDFYELFFDDAKQAAEALNIALTSRGKSEGEPIPMAGIPVHARQTYLNKLIEAGFKVAICEQMEPPGASKGPVRREVVRTVTPGTLTEESLLSPRENNYLVSYLPAAKRHPHALAALDLSTGEFFALTLEREDQVAAELSRLEPAELLIPDNWEPEPWLKGWKRCLSRRGSWSFDGKEGARVLLEHFQVTSLESFGVADSPPCLGVCGALLHYCRETQKEALSHITGLSRLHQQEGMVLDETCRRNLELNYNLKDGSRKSSLLGVMDRCITPMGSRLLAQWINRPLQSLDAIATRQESVSWLRENLVAYQDLRERLRMVHDLERFLSRIALRRASPRDLGGLRQTLQCLPQLYAILTPADGHSLAVPSLLRILADHFNGHEALTKQLEQQLADELPLNLKEGETIRLGFDQTLDTLRSLSRDGKSYLTKLEVEEREKTGIPSLKIKYHRSFGYSMEVTKTHLDKVPPRYIQRQTMTNGVRYVTEELKEYEEQLLTAEERMLEREQLLFEALAEQVARQAETLQASARAIATLDVLANFAHIAEERNYCRPLLHEGAVIEINQGRHPVVEQFSDTPFVANDIRLDNRQRTGLITGPNMAGKSTLMRQVALIVLLAHTGACVPAGSAKIGRVDRIFTRVGASDDLAGGRSTFMVEMTETAHILHHASERSLVILDEIGRGTSTYDGLSIAWAVAEHIHTQCQARTLFATHYHELTQLESQLDGVFNLTVEVKEWKDQILFLHTIVRGAADRSYGIHVAQLAGLPRAVTRRAREVLADLEEHAVHHPDSMGQGHAPASQPYQLTLFEDAPPSPALLELKRVDPDELTPKEALEALYRLKELL

SEQ ID NO: 4178 - DNA, 2646 bp, Mesorhizobium sp
  CDS (1)..(2646): transl_table=11
atgatgcagcaatatatcgagatcaaagctgctcatgcggattgtctgctcttctatcgcatgggcgacttctacgagctcttcttcgacgatgcggaagtggccagccgcgcattgggcatcacgctgacgaagcgcggcaagcatcgtggcgaggacattcccatgtgcggagtgccggtccatgcggctgatgattacctccagaagctcattgcgctcgggcatcgcgtcgctgtctgcgagcagatggaagatcccgcggaagcaaaaaagcgcggctacaaagcggtgatgcgccgcgacgtagttcggctggtcacgccgggcaccatcactgaggagaagctgctcgacccttccgaagccaactatttgatggcgctcggtcgggtgaaaggcagcgaggaactggcgctcgcctggatcgacatttccaccgggatattccgggtggcgtccaccgcgcccgatcggctgctcgccgacatttcacgcatcgatccgcgcgagttgatcgtggccgagccggtctaccacgatgcggagcttcgtcccgtcttcgatatgctgggccgtgttgtcgtaccgcagccgccggtcttctttgattcggcgagtgccgctatgcggctttcccgtttctatggtgtcgcgacgcttgatggcttcggccgcttttcccgtgcggagctgtccgccattgcgggcgccgtcgcttatgtggagaagacgcagaaggcggagcgtccgcctttggccgccccggagcgggacgaggaggggaaaagccttttcatcgatccatcgacccgtgccaatcttgagcttgcgcgcaccctttcaagtagccgcgagggcagtctcctgaaggcgatcgatcgtacggtaaccggcgccgggagcaggcttttggccgagcggctgatgtcgccgctcaccgatccgcaggtcatcgccgaacggctggattcagtgtctttcttcctcgatgagcccggcttgcgcgataggttgcgcgcgtttttgaaaggcgtgccggatataagccgggcgctgtcgcgactggcgctcaatcgtggcgggccgcgcgaccttggcgccctttcggccgggcttgaggcggccgcggcggcagccgatctcctgcgggggaaggaagcgccctctgaaatatccgctgcgctctcgacattgctgtcccttcccgcagcgctggtatcgcaccttgatcgcgcacttgccgatgatctgccgcttttgaagcgtgacggcggcttcgtgcgcggggggtacgatgccgaactcgacgagatgcgcgcgttgcgcgatcagtcgcgccgggtgatcgccggcatggagcgcgacctgatcgaggaaaccggcatccgctcgctcaagatcaggcacaacaacatcctcggctattacatcgaggtgagggccaacaacgcgggcgccctcaacggcaccgacgaagcgaaggcgcgtttcatccaccggcaaaccatggcgaatgccatgcgcttcaccacgaccgagctggctgatcttgaaaccaggatcgccaatgccgccgaccgcgcgcttgcaattgagcttgccgtcttcgagcgcctggtgggggaggtggtggcggcttcggagccgctgcgtgcagccgcccaggctcttgccgtcctcgatgtgtcggccgcgcttgcctgccttgccgaaggcgaggactattgccgcccggttgtggacgggagcctggattttcatatcgaaggtggtcgccatccggttgtcgagcaggccctgcgcaagcagcttggcgagccgttcgtggcgaacgactgcgatctctcgccggccgagggcgagaaggccggtgcgatctggctcctcaccggccccaatatgggcggcaagtccaccttcctgcgccagaacgcgcttattgcggtgctcgcacaaatgggctccttcgtgccggcgcgctccgcccgtatcggtgtggtggatcgcctcttctcccgtgttggcgcctccgatgatctggcgcgcgggcgctctactttcatggtggaaatggtggagaccgccgcgatcctgaaccaggcgggggaacgctcgcttgtcatcctcgacgaaatcggccggggcaccgccacatttgacgggctctccatcgcctgggcggccgtggaatatctccacgaaaagaatcgctgccgcgccctgttcgcaacccatttccatgagatgacggctcttacggaaaagctttcgcggctcgtcaacgtcaccatgcgcgttaaagagttcgagggcgaggtaattttcctgcacgaggtggcgcgcggcgccgccgaccgctcctacggcattcaggtggcgcgcctcgccggcctgccacagacggtggtcgagcgcgctcgcgatgtgctgcaccggctggaagagggcgaaacgggcaccaaggctgcgcgcattgtcgacgacctgccgcttttctccgcagccatgcggcaggagccgccgaaatcgaaagccccagaccatctgcgcgaggagcttaccgcgctcaatcccgacgacatgaccccgcgtgaggcgttggaggttctctacaagcttaagcggcttgtgatcgaggggtga

SEQ ID NO: 4179 - protein, 881 aa, Mesorhizobium sp
MMQQYIEIKAAHADCLLFYRMGDFYELFFDDAEVASRALGITLTKRGKHRGEDIPMCGVPVHAADDYLQKLIALGHRVAVCEQMEDPAEAKKRGYKAVMRRDVVRLVTPGTITEEKLLDPSEANYLMALGRVKGSEELALAWIDISTGIFRVASTAPDRLLADISRIDPRELIVAEPVYHDAELRPVFDMLGRVVVPQPPVFFDSASAAMRLSRFYGVATLDGFGRFSRAELSAIAGAVAYVEKTQKAERPPLAAPERDEEGKSLFIDPSTRANLELARTLSSSREGSLLKAIDRTVTGAGSRLLAERLMSPLTDPQVIAERLDSVSFFLDEPGLRDRLRAFLKGVPDISRALSRLALNRGGPRDLGALSAGLEAAAAAADLLRGKEAPSEISAALSTLLSLPAALVSHLDRALADDLPLLKRDGGFVRGGYDAELDEMRALRDQSRRVIAGMERDLIEETGIRSLKIRHNNILGYYIEVRANNAGALNGTDEAKARFIHRQTMANAMRFTTTELADLETRIANAADRALAIELAVFERLVGEVVAASEPLRAAAQALAVLDVSAALACLAEGEDYCRPVVDGSLDFHIEGGRHPVVEQALRKQLGEPFVANDCDLSPAEGEKAGAIWLLTGPNMGGKSTFLRQNALIAVLAQMGSFVPARSARIGVVDRLFSRVGASDDLARGRSTFMVEMVETAAILNQAGERSLVILDEIGRGTATFDGLSIAWAAVEYLHEKNRCRALFATHFHEMTALTEKLSRLVNVTMRVKEFEGEVIFLHEVARGAADRSYGIQVARLAGLPQTVVERARDVLHRLEEGETGTKAARIVDDLPLFSAAMRQEPPKSKAPDHLREELTALNPDDMTPREALEVLYKLKRLVIEG

SEQ ID NO: 4180 - DNA, 2703 bp, Methanosarcina acetivorans
  CDS (1)..(2703): transl_table=11
atgacagaaataatgacccctgcaatgcgccagtactacgaagccaagcaggcataccctgatacccttatcttcttcaggatgggagatttctacgaatcttttggggaggacgcaaaaaccattgcaaaggaacttgaaattaccctgacagctcggggaaaggacagaacaggggagagaatgccgcttgcagggattccctaccatgccattgacacctacctgcccaggctgataaataaggggtacaaggtagccatctgtgaacaactcgaagacccgaaaaaggcaaaaggcgttgtgaagcggggggttgtcagggttgtaacaccggggacggcaatagattcttccatgttttcggatgcctcaaacaattacctcatggcagttgcaggaagagaaggcggaaaatccggaaagaacggagaaaaagaaatggaattcggaatctccttcctcgacatctcgacaggggagttccttacaacccagtttacggactcggaaaactttgacaaactcctcagcgaacttgcccgcatgcatcctgcagaatgtatcctgcctccttccctgtacgggaattcggagcttacaggcaagttaagggagcatacaattgtgcaggaatttgctcccgaggttttcggaaccgaggaagccggagaaaaattaaaaacccatttcggggttgcaaccctcgagggcatgggctgtcaaaaactggagtttgcagtttactcggcctgggccgcccttgagtatgcaaaaaccacacagatgagggatcttacccatatcaacaccctcaggacctactcaaacaccgagttcatgatccttgactcgattaccctgcgcaacctcgaaatcgtaaaaaacgtgagagatgaaggagacgaaaattccctttacaggaccctgaactgcacaagaactcctatggggaaccgcacactgaaaaaatggcttttaaagccccttctttccgtggaaaaaatcaaccccaggctggatgcgatagaagaactcgcagaagactcgctgctccgctacgatataagggactggctctcagatgtaagggatatcgaacgcctggtagggaggatagtatacggaaacgccagtgctcgagacctcgtagccctgaagaaatctctgggcgttgttccctccctccgggactccctgctggaaaaagccaggttcgaaatgttaaaagagattgcagaagggcttgcatccttttccgaactggaagaactggctgagatgatcgaaatagcaatcatggatgaaccccctgtatccgtccgggaaggaggaatgataaaatccggatacagcccggaactcgacgaactccgggatatttcaagcaacagcaaacagtggattgcggctttccagcaaaaagaaagagaacgaagcgggatcaagtccctgaaagtcggatacaataaagtctttgggtattatatcgaggttacccatgcaaacagcagccaggtgcctgaagattacataagaaagcagacaatggccaatgccgagcgtttctttacccccgagcttaaagaaaaagaaagccttatcctgacagcaaacgaaaaagcagtggctctggaatacgaaatctttgccgaaatcacacgaaccctttcagcccgttcaagggaactccaggaaaccgcggaaagaataggaaccctggatgtccttgcaagccttgccgaggctacggaaaacaacaactatacacgcccgcagcttaccgaagactgcaagattctcataagagacggaaggcatccggtagtcgaaagtaccgtatcgggaggctttgtgcctaatgataccgaaatggactgcaaggaaaaccagtttttgcttgttaccggcccgaacatggcaggaaagtccacctatatgcgccagacagctcttattgcaattatggcccaggtgggctcctttgtcccggcttcttacgcttccgtaggcataatagaccaggtctttacaaggataggagcttttgatgaccttgcaagcgggcagagcacttttatggtcgaaatggtggagcttgcaaatatcctgaataatgcaagcccgaaaagccttgtactgcttgacgaaatcggcagggggacgagcacatacgacggatacagcatcgcaaaagccgttgttgagttcctgcacaacaggggaaaggttggaataagggctctttttgcaacccactatcaccagctcacagctcttgaagagaaattgaagcgggtcaaaaattatcatattgcagtaaaagaagacgggcatgagctggttttcctgcggaaaatcgttcccggagcaacagaccggagttacggaatccacgttgcaaggcttgccggagtcccggaaaaggttatcgaaagggcaaatgagatcctgaaggaacttgaaagggaaaacgtgcttgaagaagccgaggacggcgaaaacgggaaaaagaagaaaagcaaggcaacagctcgctatacccagatgctgcttttcgacccaggcagcggaagcagaagttcagagaaggcgaaggggctgagccctgtggaagctgccctgaaaaaggttaacccggatgagatgacgccaatagaagccctgaacaaacttcatgagctgaaaaagctgctcggctaa

SEQ ID NO: 4181 - protein, 900 aa, Methanosarcina acetivorans
MTEIMTPAMRQYYEAKQAYPDTLIFFRMGDFYESFGEDAKTIAKELEITLTARGKDRTGERMPLAGIPYHAIDTYLPRLINKGYKVAICEQLEDPKKAKGVVKRGVVRVVTPGTAIDSSMFSDASNNYLMAVAGREGGKSGKNGEKEMEFGISFLDISTGEFLTTQFTDSENFDKLLSELARMHPAECILPPSLYGNSELTGKLREHTIVQEFAPEVFGTEEAGEKLKTHFGVATLEGMGCQKLEFAVYSAWAALEYAKTTQMRDLTHINTLRTYSNTEFMILDSITLRNLEIVKNVRDEGDENSLYRTLNCTRTPMGNRTLKKWLLKPLLSVEKINPRLDAIEELAEDSLLRYDIRDWLSDVRDIERLVGRIVYGNASARDLVALKKSLGVVPSLRDSLLEKARFEMLKEIAEGLASFSELEELAEMIEIAIMDEPPVSVREGGMIKSGYSPELDELRDISSNSKQWIAAFQQKERERSGIKSLKVGYNKVFGYYIEVTHANSSQVPEDYIRKQTMANAERFFTPELKEKESLILTANEKAVALEYEIFAEITRTLSARSRELQETAERIGTLDVLASLAEATENNNYTRPQLTEDCKILIRDGRHPVVESTVSGGFVPNDTEMDCKENQFLLVTGPNMAGKSTYMRQTALIAIMAQVGSFVPASYASVGIIDQVFTRIGAFDDLASGQSTFMVEMVELANILNNASPKSLVLLDEIGRGTSTYDGYSIAKAVVEFLHNRGKVGIRALFATHYHQLTALEEKLKRVKNYHIAVKEDGHELVFLRKIVPGATDRSYGIHVARLAGVPEKVIERANEILKELERENVLEEAEDGENGKKKKSKATARYTQMLLFDPGSGSRSSEKAKGLSPVEAALKKVNPDEMTPIEALNKLHELKKLLG

SEQ ID NO: 4182 - DNA, 2703 bp, Methanosarcina barkeri
  CDS (1)..(2703): transl_table=11
atgactaaaatgatgacccctgcaatgtgccagtactatgaagccaagcaggcatatcctgacactctgatcttcttccgcatgggagacttttacgaatctttcggagaagacgcaaaaactattgcaaaagaactcgagatcacgcttacagcccgaggaaaggacaaatcaggagagagaatgccgcttgcaggaataccttaccatgcaattgacacctatctgccgaggcttataaataaagggtataaagtggcaatttgcgaacagcttgaagacccgaaaaaggcaaagggaattgtaaaaagaggggttgtcagggttgtcactccaggtacggcaattgactcttccatgttttcagatgcctcaaacaattacctcatggcagttgctgggagagaaattggaaagcctggaaagaatgccgaaaacgaattcgaaattggggtgtcgtttctcgatatttctacaggtgaattccttacaacgcaattcagggactcggaaaattttgaaaagcttctaagcgagctcgctcgcatgcggccgtcagaatgcattcttccttcatctctgtatgaaaatcccgcacttgccgagcggctgagagcccaaactattgtgcaggaatttgcccccgatatttcaggagcaaaggaagctggagaaaggttgaaaaaccatttcagggttgcaacccttgaaggcatgggctgtgagaacctggattttgcagtgtattcggcctgggctgccctggaatatgcacagactacacagatgcgggagcttacccatattaataccctgagaacctactcaaattccgaatttatgatccttgattccgtaactctgcggaatctcgaaattgttaaaaacgtgcgagatgaaggggacgaaaattctctttaccgcattctgaatcatacgaaaacgccaatgggaagccgtgccctgaaaaagtggcttttgaaacctttgctttccgtagaaaaaatcaactatcgactcgatgctgttgaagaactgacagcaaagcctctgctccgttacgatctccggaactggctttcagatgtcagggatatagaacgcctcgtaggcagggtagtctatgggaactcaaacgcaagagaccttgtagccctgaaaaaatcccttgaagctctgcctcctgtccgggattcccttctagaaaacattgaatccacaattttaaatgatattgcagtcggacttgcatcgttttccgaacttgaaaatctggctgaaatgatagatagagcaatcgttgatgagcctccaatctcagttcgggaaggaggcatgataaagtctggatataatgcagaactcgatgaactcaaggatattgcaagcaacagcaggcagtggattgcaaattttcagcagaaggaaagagaaagaagcggcataaagtccctgaaagtgggatataataagatttttgggtattacatagaagtaacaaatgccaacagcagccaggtgcctgaggattatatcagaaagcaaaccatggcaaatgccgagcgcttttttacccctgaactcaaggaaaaagagagccttatcctgacagccaatgaaaaagctatagctctcgagtatgaaatctttacagaaattttgcagaccctttcagcccattcaagagaacttcaggaaaccgccgaaagaataggcacgcttgatgtccttacagacctggctgaagtagcagaaaataacaattatatcaggccccagcttacagacgactgcaagattcttatccgggacgggaggcatccggtagttgaaaacaccgtacatggcggctttgtcccgaacgataccgaaatggactgcaaggaaaatcagtttttgctggtaacaggcccgaatatggcaggtaagtccacttacatgcgtcagactgcccttatagctattatggctcaggtaggttcttttgttcctgcatcctatgcttcaatagggattattgatcaggtctttacaagaattggggcatttgacgaccttgcaagtgggcagagtacctttatggtagaaatggttgagcttgccaatatcctgaataatgcaagcccgagaagtcttgtgcttcttgatgagatcggcaggggaacaagtacctatgatgggtacagcattgcaaaagctgttgtggaattcctgcataacagggggaaagtaggagtaagggctctatttgcaactcattaccaccagctcacagcccttgaagagaaattaaaaagagtcaaaaattatcatgttgcggtaaaagaagaaggtcatgagttagttttcctgcgaaagatcgtgccgggtgcaacagacaggagttatggaatccaggttgcaaggcttgcaggcgttccggaaaaggtaattgaaagggcaaatgagattcttaaggaactcgaaagagagaacgtgctcgaagaggttgaagacagcaagaacggaaaaaagagaaaaagtaaggctacagcgcgttatacccagatgatgctgtttgaccctggagacagcggtggaaatacagcaaaggtaaacagacccagccctgtagaaacagttcttaaaaaactgaatgtggacgaaatgacaccaatagaagccctgaacaagcttcatgagctcaaaaggctgctgaattga

SEQ ID NO: 4183 - protein, 900 aa, Methanosarcina barkeri
MTKMMTPAMCQYYEAKQAYPDTLIFFRMGDFYESFGEDAKTIAKELEITLTARGKDKSGERMPLAGIPYHAIDTYLPRLINKGYKVAICEQLEDPKKAKGIVKRGVVRVVTPGTAIDSSMFSDASNNYLMAVAGREIGKPGKNAENEFEIGVSFLDISTGEFLTTQFRDSENFEKLLSELARMRPSECILPSSLYENPALAERLRAQTIVQEFAPDISGAKEAGERLKNHFRVATLEGMGCENLDFAVYSAWAALEYAQTTQMRELTHINTLRTYSNSEFMILDSVTLRNLEIVKNVRDEGDENSLYRILNHTKTPMGSRALKKWLLKPLLSVEKINYRLDAVEELTAKPLLRYDLRNWLSDVRDIERLVGRVVYGNSNARDLVALKKSLEALPPVRDSLLENIESTILNDIAVGLASFSELENLAEMIDRAIVDEPPISVREGGMIKSGYNAELDELKDIASNSRQWIANFQQKERERSGIKSLKVGYNKIFGYYIEVTNANSSQVPEDYIRKQTMANAERFFTPELKEKESLILTANEKAIALEYEIFTEILQTLSAHSRELQETAERIGTLDVLTDLAEVAENNNYIRPQLTDDCKILIRDGRHPVVENTVHGGFVPNDTEMDCKENQFLLVTGPNMAGKSTYMRQTALIAIMAQVGSFVPASYASIGIIDQVFTRIGAFDDLASGQSTFMVEMVELANILNNASPRSLVLLDEIGRGTSTYDGYSIAKAVVEFLHNRGKVGVRALFATHYHQLTALEEKLKRVKNYHVAVKEEGHELVFLRKIVPGATDRSYGIQVARLAGVPEKVIERANEILKELERENVLEEVEDSKNGKKRKSKATARYTQMMLFDPGDSGGNTAKVNRPSPVETVLKKLNVDEMTPIEALNKLHELKRLLN

SEQ ID NO: 4184 - DNA, 2565 bp, Methylococcus capsulatus
  CDS (1)..(2565): transl_table=11
atgcccgatccatccgacctgtccagacacacgccgatgatgcagcagtatctgcgcatcaaagcggagcatccggaccggctgctgttttaccggatgggcgatttctatgaattgttcttcgaagacgcccggcgggcggcaaggctgctggacctgaccctcaccagccggggcgaatcgggcggcgaacgcgtcgccatggcgggcattccttaccatgcggtcgacggctatctggcgcgcctcatccggctgggcgaatcggtggcgatctgcgagcaggtcggcgatccggccacctcgaaagggccggtggagcgcaaggtggtgcggatcgtgacgcccggcacggtgaccgacgaggcgctgctggaggagcgccgcgacaacctgctggcggcggttgcccgcgatggcgccgtgttcgggctggcggtgctggatctgtccggcgggcgtttcactctgcaacagccggggtcggtggcgcagctcttgaacgagctggagcggctgaatccggccgagatcctggtcagcgaggacgaaccgttgacggaggaactgtccggacggcggggtctgacccggcgtcccccctggcatttcgatccggagagcggccgccgccagttgctgagccagttcggcacccaagacctggcgggcttcggctgtgagcatctgggcctggccataggcgccgctggctgcctgctgcaatacctgcgcgacacccagcgcagcgccctgcctcacatccgcagcatccgcgccgagaccgggacggaatatatcggcctggacgccgccagccgccgcaacctggagctggactggcatccttccggccgcgccgagttcaccctgctgggcctcctggaccgcaccggatcggcgatgggcgggaggctgctgcggcgctggctgcatcagcctttgcgcgaccggacgaccctcatgctccgccagcaagcgatcggcgagttgctggcggaccgccgcttcgaagctctgcacgacttgctacgcggcgtgggcgatgtcgagcggatcgccgcccggatcgccctcaaatcggccagaccccgcgacctgtccacgttgcgccagacgctcaaggccctgcccgccctccgggagaccctccacggtaccgaaagcgcactgctgggagaactgacggggcgcctcgtcgaccagcccgagctgagcgagctgttgcaacgggccatcgtcgatgacccgccgcagctgatccgcgacggcggtgtgatcgccgagggctaccacgccgagctcgacgagctgcgtctcctgagtgaaaacgccgaccgtttcctggccgagctggaggaaaaggagcgtgagcacaccgggctgggtgctctcaaggtcggttacaaccgcgtgcagggcttctacatcgaactgccgcggagccaggccgaccgggcgccggtgcattacatccggcgtcagacgctgaaaaacgccgagcgctacgtcacgccggagttgaaggccttcgaggacaaggtgctgagcgcccgcgaaagagcgctgtcctgcgaaaaagccctctatgaggccttactggaaatactggggcgctggctgcccgcactgcaggactgcgcggcggggctggccgaactggacgtactggcgaatctggcggagcgcgccgaccggctgaactgggtagcgccgcgactggtggacgctccgggcatccgcatcatcggcggacgccatcccgtggtcgagcaggtcggcggcacaccgttcgtgcccaatgacctggcattcggtccgaaccgccgcatgctggtcatcaccggcccgaacatgggcggcaaatcgacctacatgcggcaggccgcgatcatcgtgctgatggctcacatcgggagccacgtcccggcggcggaagccgaaatcggcccgatcgaccgcatctacacccgtatcggcgcttccgacgacctggccggcggccgctctaccttcatggtggagatgaccgagaccgccaacatcctgaacaacgccacggcggaaagcctggtgctgatggacgaaatcggccgtggcaccagcaccttcgacggactttcgctggcctgggcctctgccgagcacctcgcgcgggaaacccgcgcctatacgctgttcgccacccattatttcgaactgacggcattggccgaggaatgcgaggacgtcggcaacgtccacctggacgccgtggagcacggcgacaaggtggtgttcctgcatgcggtccgggaaggaccggcgagccagagctatggtctacaggtggcggcgctggcgggggtgccgcagacggtcatcgacaacgcgcggcggaaactggagcagctcgaacggcaggctcggtcggcgcatcagcaggccgcaccggtggcccagctcgatttgttcctgcctccggagccgcaccccgtggtgcggcggctcgagtccttggacgtcgatgggctgagcccgcgcgaggcactgaatctgctgttcgagttgaaacagtcgctgtga

SEQ ID NO: 4185 - protein, 854 aa, Methylococcus capsulatus
MPDPSDLSRHTPMMQQYLRIKAEHPDRLLFYRMGDFYELFFEDARRAARLLDLTLTSRGESGGERVAMAGIPYHAVDGYLARLIRLGESVAICEQVGDPATSKGPVERKVVRIVTPGTVTDEALLEERRDNLLAAVARDGAVFGLAVLDLSGGRFTLQQPGSVAQLLNELERLNPAEILVSEDEPLTEELSGRRGLTRRPPWHFDPESGRRQLLSQFGTQDLAGFGCEHLGLAIGAAGCLLQYLRDTQRSALPHIRSIRAETGTEYIGLDAASRRNLELDWHPSGRAEFTLLGLLDRTGSAMGGRLLRRWLHQPLRDRTTLMLRQQAIGELLADRRFEALHDLLRGVGDVERIAARIALKSARPRDLSTLRQTLKALPALRETLHGTESALLGELTGRLVDQPELSELLQRAIVDDPPQLIRDGGVIAEGYHAELDELRLLSENADRFLAELEEKEREHTGLGALKVGYNRVQGFYIELPRSQADRAPVHYIRRQTLKNAERYVTPELKAFEDKVLSARERALSCEKALYEALLEILGRWLPALQDCAAGLAELDVLANLAERADRLNWVAPRLVDAPGIRIIGGRHPVVEQVGGTPFVPNDLAFGPNRRMLVITGPNMGGKSTYMRQAAIIVLMAHIGSHVPAAEAEIGPIDRIYTRIGASDDLAGGRSTFMVEMTETANILNNATAESLVLMDEIGRGTSTFDGLSLAWASAEHLARETRAYTLFATHYFELTALAEECEDVGNVHLDAVEHGDKVVFLHAVREGPASQSYGLQVAALAGVPQTVIDNARRKLEQLERQARSAHQQAAPVAQLDLFLPPEPHPVVRRLESLDVDGLSPREALNLLFELKQSL

SEQ ID NO: 4186 - DNA, 2703 bp, Methanosarcina mazei
  CDS (1)..(2703): transl_table=11
atgactgaaatgatgacccctgcaatgcgccagtactatgaagccaagcaggcataccctgacacccttatcttcttccggatgggagacttttacgaatcctttggagaagacgcaaaaaccattgcaaaagagctcgaaatcacgttaacagccaggggcaaggacaggtcaggggagaggatgcctcttgcaggcattccttaccatgccattgatacataccttccaaggctgataaacaaaggatacaaggtagccatctgtgaacagctcgaagacccgaagcaggcaaaaggagttgtaaagagaggcgttgtcagggtggtaaccccggggacagcaatagactcatccatgttcccggatgcgtcaaataactaccttatggcggttgcagggaaagaagtcggaaagaccggaaaaagcggagaaaaggaaatggaattcggactctcattcctcgacatttcaacaggggagttccttacaacccagtttacggattccggaagctttgataaattactcagcgaacttgcccgaatgaagcctgcggaatgcatcctgcccccgaccctgtacgggaattcggtacttgttgacaggttaagggaacagacaatagtccaggaatttgccccggaaatctctgggatagaagaagccggggaaaaactgaaaattcatttcagggtttcaaccctcgagggcatgggctgtgaaaaactggaattcggagtctattccgcatggtctgcccttgaatatgcaaaaacgacccagatgagagaccttgctcatatcaataccctcaggacctattcaaacaccgaattcatggtcctcgactctgtcaccctccgcaacctcgaaatcgtgaaaaacgtgcgggatgaaggggaccataactccctttacaggactttgagctttacaaagacgccaatggggagtagaattctgaaaaaatggctcttaaagccgctcctttccgtagaacagataaaccacaggctggacgcagtagaagagctggcaggaaaccctctgctccgctatgatattcgggactggctttcggaggtaagggatattgaacgcctcgtaggcagaatagtgtacggaaacgccaatgcaagggacctcgtagccctgaaaaagtcccttgatgccgtaccctctatccgggactgccttctggaaaaagccggagcagagatgttaaaagggattgctgaaggtctcgcatcattttcagaaattgaagaactggccaaaatgattggaaatgcaattgttgaagagcctcccgtaagcgtccgcgaaggcgggatgataaaatccgggttcagcgaggaacttgacgagctaagagacatttcaagtaacagcaagcagtggattgcagccttccagcagaaagaaaaggacaggacagggatcaagtccctgaaaatcggatacaataaggtcttcgggtattatatcgaggttaccaatgcaaacagcagccaggtacctgatgactatataagaaagcagacaatggcaaatgccgagcgtttctttacgcctgagcttaaagaaaaagaaagcctgatcctgacagcaaacgataaagccgtggctcttgagtacgaaattttcacagaaatcacagagaccctttcagcccattcaaaggagctccaggaaacagcagaaaggataggcgtacttgatgtccttgcagaccttgccgaagttgcggaaaataataattatacacgccctcagctcacagaagactgcaagattcttatccgggacggcaggcatccagtagtcgaaagtacggtatccggaggttttgtcccgaatgatacggaaatggactgcaaggagaaccagtttttgctggttacaggccccaatatggcagggaaatcaacctatatgcgccagacagcccttattgcaattatggctcaggcaggttcttttgtcccggcttcctatgcttccataggtgtcatcgaccaggtttttacaaggataggggcttttgacgaccttgcaagcggacagagcacttttatggttgagatggtggaactggcaaatatccttaacaatgcaagcccgaaaagccttgtgctgcttgacgaaataggcaggggaacgagcacctatgacgggtacagcattgcaaaagcggttgttgagtttctgcacaacaggggaaaggtaggcataagggctctttttgcgacccattaccatcagctcacatcacttgaagagaaattaaaaagggtaaaaaattatcatattgcagtaaaagaagaaggacacgagctggtttttctgaggaaaatcgtgccgggggcaaccgacaggagttacgggatacatgttgcaaggcttgccggagtcccggaaaaggtaatcgaaagggcaaatgagatcctcagggaactcgaaagggaaagcgtactcgaagaatccgaagactgtgaaaacgggaaaaaaagaaaaggcaaagcgaccacccgttatactcagatgctcctttttgaccccgggagcagaagcgggaattcggaagtaaaaagaggattaagccctgtagaagcagccctgaaaaagatgaatgtggatgaaatgaccccgatagaagccatgaataaacttcatgagctgaaaaagctgcttggttga

SEQ ID NO: 4187 - protein, 900 aa, Methanosarcina mazei
MTEMMTPAMRQYYEAKQAYPDTLIFFRMGDFYESFGEDAKTIAKELEITLTARGKDRSGERMPLAGIPYHAIDTYLPRLINKGYKVAICEQLEDPKQAKGVVKRGVVRVVTPGTAIDSSMFPDASNNYLMAVAGKEVGKTGKSGEKEMEFGLSFLDISTGEFLTTQFTDSGSFDKLLSELARMKPAECILPPTLYGNSVLVDRLREQTIVQEFAPEISGIEEAGEKLKIHFRVSTLEGMGCEKLEFGVYSAWSALEYAKTTQMRDLAHINTLRTYSNTEFMVLDSVTLRNLEIVKNVRDEGDHNSLYRTLSFTKTPMGSRILKKWLLKPLLSVEQINHRLDAVEELAGNPLLRYDIRDWLSEVRDIERLVGRIVYGNANARDLVALKKSLDAVPSIRDCLLEKAGAEMLKGIAEGLASFSEIEELAKMIGNAIVEEPPVSVREGGMIKSGFSEELDELRDISSNSKQWIAAFQQKEKDRTGIKSLKIGYNKVFGYYIEVTNANSSQVPDDYIRKQTMANAERFFTPELKEKESLILTANDKAVALEYEIFTEITETLSAHSKELQETAERIGVLDVLADLAEVAENNNYTRPQLTEDCKILIRDGRHPVVESTVSGGFVPNDTEMDCKENQFLLVTGPNMAGKSTYMRQTALIAIMAQAGSFVPASYASIGVIDQVFTRIGAFDDLASGQSTFMVEMVELANILNNASPKSLVLLDEIGRGTSTYDGYSIAKAVVEFLHNRGKVGIRALFATHYHQLTSLEEKLKRVKNYHIAVKEEGHELVFLRKIVPGATDRSYGIHVARLAGVPEKVIERANEILRELERESVLEESEDCENGKKRKGKATTRYTQMLLFDPGSRSGNSEVKRGLSPVEAALKKMNVDEMTPIEAMNKLHELKKLLG

SEQ ID NO: 4188 - DNA, 2592 bp, Moorella thermoacetica
  CDS (1)..(2592): transl_table=11
atggctagggaacaggccttaacccccatgatggcgcaataccgccagatcaagtcccagtacccggattgcatcctcttcttccgcctgggagatttttatgagatgttttatgaagacgccgaggtggcagcccgggaattggacctggttttgacgacccggggcggtaaagaggcagcccccatgtgcggggtaccctttcacgccgccgacagttacctggcccgcctggtaggtaagggctacaaggtggctatttgcgaacagatggaggacccccgccaggccaagggcctggtacgccgggaggttatccgggtggttaccccgggtacgataaccgatgagaaggccctgacccccggcggaaataactacctggcggcgatagtgcgctataacggctgctgggggttggcctgggccgatgcctccacgggggaattcttgtttaccacctgcccggaccaggaaaccctggtggacgagctggtacgcctcatgccgtcggaatatttgctgcccggggaactggcccgggatacggccctaaaaaggctcctgcagatttacacccggggcgtgattaccggctggcaagtagccagtaatccggaggcagcccggcagtccctggaggaccattttggccacgaggccctggccggggtcgaattaccggcagctgcgggcctggcagcggccatgattctttctttcctggttgctacccagcacaactccctggcccacctggaggccccggctgccgcagccacaaccagccggatgttcctggatcaggctaccaggcgcaacctggagctggtgactgccggccgggagcaaaaacgggagggttccctcctctgggtcctggataagaccctcacagccatgggtgcccggaccctgaggcgctggctggaccagcccttggtagatgccggggccatcaaggaacgccaggaagccgtcgccgaactggttgagggcttcatcctgcgccaggaattgcgggagaggctgcaggtggtgcgggacctggaacgcctggccggcagggtggcctatgggacggcaggcgggcgggaactccaggccctgcggggttccctggccgtaatccccggtatcctggagctgatgagcgaagtacattccaggctcctggcgcaggtgagggcccaactggacccccttgacgacctggtcgatctcctgggccgggccctggtggacgatcccccggccagcatcaccgagggcggcattatccgtaccggctataatggagaggtcgataagctgcgcgaggcggccacccacggccgggattggattgccagcctggaagccgaggagcgggaacgcacagggattaaatccctcaaggtcggttacaaccgtgtcttcggttactacatagaggtcacccgtcccaacctcccccaggtgccggccgactacgagcgcaaacagaccctggccaatgccgagcgttttgttacccggcgcctgcaggaactggaacgtcaggtcctgggggcagaggagagactggtccaactggagtatgaactctttcagggcctgcgggaagaggtgctgggcgtcctgccccgtatccaggccacggcccgggccctgggagtactggacgcccttatttccctggctacggtggccgtagataacaactatacctgtccacgggtcgatgacggtacggtgattgaaatcgagcaggggcgccacccggtggtggaactggtcggttctccggggacctttgtccccaacgacacctacctggaccaggaacagtatatccagatcattaccgggcccaatatggccggtaaatccacctatatccgccaggtagctctgattgtactgctggcccagattggcagctttgtaccggcccggcgagcccatatcggcctggtggacaggatttttacccgggtcggtgctgccgatgatatctttgccggccagagcacctttatggttgagatgcaggaagtggccggtatcttgaaacacgccaccaggcggagcctggttatccttgatgaagtgggccggggtacaagcactgctgacggtctgagtattgcccgggcagtaacggagtatattcacaatgtcattggtgcccgctgcctctttgccacccactaccacgaattggttagcctggcggaggaattgtccggggtccgcaattactgcgttgccgtcctggaagagggagaggacattaccttcctccggacgatagtgccaggtagcaccgacaagagctacggaatccatgtggcccgcctggcgggcctgccggagcaggtcctggaacgggcgcgagaaattctggaacagcaacccagggcccaggtgcgggttttaacgaaaccggtaaaaaagccgacccttactcccggcgaggtacaggtactggaggaactggccggttataacctgatggcggccacgcccctggaagccatggagcagatcttccgctggcagaagatgcttcacaaagagctggatattgttaaaaggagcaggggatga

SEQ ID NO: 4189 - protein, 863 aa, Moorella thermoacetica
MAREQALTPMMAQYRQIKSQYPDCILFFRLGDFYEMFYEDAEVAARELDLVLTTRGGKEAAPMCGVPFHAADSYLARLVGKGYKVAICEQMEDPRQAKGLVRREVIRVVTPGTITDEKALTPGGNNYLAAIVRYNGCWGLAWADASTGEFLFTTCPDQETLVDELVRLMPSEYLLPGELARDTALKRLLQIYTRGVITGWQVASNPEAARQSLEDHFGHEALAGVELPAAAGLAAAMILSFLVATQHNSLAHLEAPAAAATTSRMFLDQATRRNLELVTAGREQKREGSLLWVLDKTLTAMGARTLRRWLDQPLVDAGAIKERQEAVAELVEGFILRQELRERLQVVRDLERLAGRVAYGTAGGRELQALRGSLAVIPGILELMSEVHSRLLAQVRAQLDPLDDLVDLLGRALVDDPPASITEGGIIRTGYNGEVDKLREAATHGRDWIASLEAEERERTGIKSLKVGYNRVFGYYIEVTRPNLPQVPADYERKQTLANAERFVTRRLQELERQVLGAEERLVQLEYELFQGLREEVLGVLPRIQATARALGVLDALISLATVAVDNNYTCPRVDDGTVIEIEQGRHPVVELVGSPGTFVPNDTYLDQEQYIQIITGPNMAGKSTYIRQVALIVLLAQIGSFVPARRAHIGLVDRIFTRVGAADDIFAGQSTFMVEMQEVAGILKHATRRSLVILDEVGRGTSTADGLSIARAVTEYIHNVIGARCLFATHYHELVSLAEELSGVRNYCVAVLEEGEDITFLRTIVPGSTDKSYGIHVARLAGLPEQVLERAREILEQQPRAQVRVLTKPVKKPTLTPGEVQVLEELAGYNLMAATPLEAMEQIFRWQKMLHKELDIVKRSRG

SEQ ID NO: 4190 - DNA, 2682 bp, Myxococcus xanthus
  CDS (1)..(2682): transl_table=11
gtgaacgagggtgcgggcgcccgggagattgcctccctgacccccatgatgcgccagtacatggaggtgaaggcgctccacccggactcgctgctgttcttccggttgggtgacttctacgagatgttcttcgaggacgcggtgaaggcctcggagatcctccagatcacgctcaccgcgaggtccaagggcgcggacaaggtgcccatgtgtggggtgccctatcatgccgcgcggcgctacatcggccggctcgtgtcggaagggctgaaggtcgccatctgcgaacaggtggaggagccgggcaacgggccgggcatcgtccgccgggaagtcacgcgggtgattaccccgggcatggtgctggacgaagaggtgctggagccgcaggccagcaacttcctggccgccgtgtcctggaacgacaagggctggggcgcggcgctgctggaggcgtccaccggcgagttcatggccctggaggccccgggcatcgcggagctggcggagtcgctgtcgcgcgtggagccccgtgaactgctggtgccggacgggaagcgggacgcgccggaggtggcgcagctgctcgcccggctggtacgcacgccggcggtagcggagggcgaggccgcgtcattcgaacccacgcgggcggcgggctacctgcgcagccatttcgcggtgcagtcgctgtccgcattcgggctggatgacgcgcccctggccgcgggcgccgcgggcgctgcgctgcgctacctgaaggacacgcagaagacggcggcggcgcacgtggaccggctgagccggcaggagcgcggcggcaacctcctcatggatgagtcctcccgggccaacctggaggtactgcgctcgctgcgggacggtgggcgcaagggctcgctgctgggcgtgttggacaagacggtgacgagcctgggcgcgcgcaagctggcgcggtggctggcgtctccgctgggctccctgccggaaatccacgcgcggctggacgcggtggaggagctgtccgggcgcagcgtgtggcgcgaggagctcgctggcatcctcaaggaagtaggagacctggagcggctgtgcggccggctgtcgctgggcgcgggcaatgcacgggacttgcgcgcgctgggcttgtcgctggcgcagcttccccgggtggtggcggtgctggcgcggtgtgagtccccgctgctcaagtccctgacggggcccctttccgcgctgccggagctggcggagctgctgtcgcgcgccgtggcggaagagccgccggtgacgctgaaggacggcggcatgattcgcgccggcttccacgcggagctggacaagctggtggcgctgtccacgtccggaaaggacctgctgcttcagatcgagcagcgggagaaggagcgcaccggcatctcctcgctgaaggtccgctacaacaaggtcttcggctactacctggaggtgacgaagtcgaacctcgaccgggtgcccaaggattacatccgcaagcagacaacggtgaactccgagcgcttcgtcaccccggagctgaaggagtacgaggagcaggtgctcaccgccgaggagcggcggtgcgcgctggaaattcagctcttcgaggagctgcgcgcgcaggtggtgtcggcggcgccgcgcatccggtccgccgcggaggcggtggccactggggacgcgctgctgtccttcgcgcggtgcgcggcggagtacggctacacgcggccggaggtggacgcgtccgtggcgctcagcatcaccgccgggcggcacccggtggtggagcgcatgctgggggcgggggattcgttcgttcccaacgacgtccgcctggatccggcggaggacgcgcagctgatggtgattaccggtccgaacatggccggcaagagcacggtgatgcggcaggtcgcgctgacggcgctgatggcgcaggcgggctcgttcgttccggcgaaggcggcgcgcatcggcctgtgcgatcgcatcttcacgcgcgtgggcgcggcggacaacctggcgcgcggtcagtccaccttcatggtggagatgacggagaccagccacatcctccaccacgccacgaacaagagcctcatcatcctggatgagattggacgtggcacgtccaccttcgacgggctctccatcgcctgggcggtggcggagcacctgcacgacacggtgggggctcgcgcgctgttcgccacgcactaccacgagctggtggacctggcccgcgagcggccccgggtgaagaacctgtgcgtcgccgtgaaggagcagaacggcaaggtcatcttcctgcgcaagctggtgccgggtggggccagccgctcctatggcatcgaggtggcgaagctggcgggcctgcctccggaggtcgtggggcgcgcgcgtgagttgctccagaacctggagtccggggagctggatgacgcgggccggccccgggtggccgtgcggcagccccagggcggccggcgtggggcttcgaccgggcagcttggactgttcggcatggagccggcgcagggtggcaccggggtgacgcccgcgcagcagaaggcgctggacgcgttgaagggggcgagcatcgaccggatgacgcccctggacgcgctcaacctgctggcgaagctccagcgcgagctggagtag

SEQ ID NO: 4191 - protein, 893 aa, Myxococcus xanthus
MNEGAGAREIASLTPMMRQYMEVKALHPDSLLFFRLGDFYEMFFEDAVKASEILQITLTARSKGADKVPMCGVPYHAARRYIGRLVSEGLKVAICEQVEEPGNGPGIVRREVTRVITPGMVLDEEVLEPQASNFLAAVSWNDKGWGAALLEASTGEFMALEAPGIAELAESLSRVEPRELLVPDGKRDAPEVAQLLARLVRTPAVAEGEAASFEPTRAAGYLRSHFAVQSLSAFGLDDAPLAAGAAGAALRYLKDTQKTAAAHVDRLSRQERGGNLLMDESSRANLEVLRSLRDGGRKGSLLGVLDKTVTSLGARKLARWLASPLGSLPEIHARLDAVEELSGRSVWREELAGILKEVGDLERLCGRLSLGAGNARDLRALGLSLAQLPRVVAVLARCESPLLKSLTGPLSALPELAELLSRAVAEEPPVTLKDGGMIRAGFHAELDKLVALSTSGKDLLLQIEQREKERTGISSLKVRYNKVFGYYLEVTKSNLDRVPKDYIRKQTTVNSERFVTPELKEYEEQVLTAEERRCALEIQLFEELRAQVVSAAPRIRSAAEAVATGDALLSFARCAAEYGYTRPEVDASVALSITAGRHPVVERMLGAGDSFVPNDVRLDPAEDAQLMVITGPNMAGKSTVMRQVALTALMAQAGSFVPAKAARIGLCDRIFTRVGAADNLARGQSTFMVEMTETSHILHHATNKSLIILDEIGRGTSTFDGLSIAWAVAEHLHDTVGARALFATHYHELVDLARERPRVKNLCVAVKEQNGKVIFLRKLVPGGASRSYGIEVAKLAGLPPEVVGRARELLQNLESGELDDAGRPRVAVRQPQGGRRGASTGQLGLFGMEPAQGGTGVTPAQQKALDALKGASIDRMTPLDALNLLAKLQRELE

SEQ ID NO: 4192 - DNA, 2604 bp, Oceanobacillus iheyensis
  CDS (1)..(2604): transl_table=11
atggcaaagctcacgccgatgatggaacaatacatacaaataaagaacgaatataaagatgcttttcttttttatagactaggtgatttctatgaactattctatgaggatgctacacgtgcagcacaagaattagagattaccttaacaaagagagcaggtggcaaaggggaccctattccaatgtgtggagtgccttatcattctgctgaaaattatataaagacacttatcgatagaggatataaggtagcgatatgtgaacaggtggaagaccctaaaacagctaagggagttgttaaaagggaagtagttcaaatgataacacctggaacggttatggaaagtaccatgttaactgatggagaaaataactatattggtagtctatctcattttcaagatggttcttatgtcatcgtatataacgatttatctactggtgagaatcgtttagcatttattaatgatggatgggatgctgtcattcatgaattttataatcaaccaatcaaggagattgttatctcaagcaatcttccagaagaactgcaaattcaattaaaagaacgtttgaatgtcaccttgtcttatcaagatgaagttacctttaatgcagagtttcgtgaattaagtgagaacctaaatgacgagagattgatgaaagcatttagtagattattgaactatatccaaacgacacaaaaaagatcattacatcatttgcaaaaagcagaagtgatcgaattaaaaaagtatatgagtcttgatatgtactccaaaagaaatcttgaattaacggagacgatcatgaaaaaatcaaaacatggcagtcttctgtgggtactcgataaaactgtaacagcaatgggagcaaggactttgaaaaagtggttagagcggccgttgttaagtaagcagaagataaatgaacgattagaagtggtacaaggtttttatgatggttttatggagagagagagtcttcgtgatttattaaaatccgtatatgatctggaacggctttcaggacgtattgcatttggcaatgtgaatgccagggatttaatccaattaaaacagtcattatcacggattccggcaatacaagaaactttaagacaattcgatcagccagaaattacaagattggcagaaatgctcatttatcctgaacagatggtagaatctctagaaaagagtattgtagacgaacctccaatttctataaaagaaggctcattgatcaaggaaggataccatgatcaattagatacgtacagagatgcttctagaaatgggaagaaatggatagcccaattagaacatcaagaacgcgaagagacgggtatacgttctttaaaggtcggctacaatcgggtgtttggctattatatagaaataacgaagccgaatcttcatttgttacctgaaggacgttatgaacgaagacaaacattaacgaatgctgaacgctttgtaaatgaagaactgaaagaaaaagagaaacttattttagaagcggaagaaaaaagtgtggaacttgaatatgatttatttattcaaataagagatcagattaaagaagaaattcctttaattcaacaattagctcatattattagccaaatggatgttttgcaaagttttgctacggtaagtgaatcgaataattatgttcgcccggactttaacgacgaacagttacaagtcactaaagggagacatccagtagttgaacaagtaatgaaggatggaacatttgtcccaaatgatgttgtctttgacaaaagtcaaaatatgctcttgattacaggaccaaatatgtctggtaaaagtacgtatatgcgccaagtcgcattaacttcaattatgggacaaattggttgctttatcccagcagaacaagctacgctatgtgtattcgatcaaatatttactagaattggggctgcggatgatttagtatcgggtcaaagtacctttatggtagaaatgttagaagctagacatgcaatctctaatgctactgatcgaagtttaatattattagatgaaattggaagaggaacaagcacgtatgatggtatggcactagctcaagcgattgtagaatatattcatcataacatagccgcaaaaacattgttctctacacattatcatgagttaacagctttagaagattctcttcatcatttaaaaaatattcatgtacgtgcggaagaacatgagggtaatgttgtatttcttcatcaaataaaagaaggtgcagctgatcaaagttatggtattcacgtagctaaattggcggatttgcctaatgaacttattgaacgtgcttcggtaatcttagaagaactagaagatgattcaaataaaaagcctactccgacaaaagataaattagagtcaggtcagctctctttctttatagaagagtcaaataagaaaaaggcagaaatgcctaaacaagagaaaactcataacaatcaagaacagtctgttattgaagatttaaagaatgttaatgttctggatttaacaccgttagaagcaatgaatgaattgtatcgcctacaaaaaggattaaagcaatattag

SEQ ID NO: 4193 - protein, 867 aa, Oceanobacillus iheyensis
MAKLTPMMEQYIQIKNEYKDAFLFYRLGDFYELFYEDATRAAQELEITLTKRAGGKGDPIPMCGVPYHSAENYIKTLIDRGYKVAICEQVEDPKTAKGVVKREVVQMITPGTVMESTMLTDGENNYIGSLSHFQDGSYVIVYNDLSTGENRLAFINDGWDAVIHEFYNQPIKEIVISSNLPEELQIQLKERLNVTLSYQDEVTFNAEFRELSENLNDERLMKAFSRLLNYIQTTQKRSLHHLQKAEVIELKKYMSLDMYSKRNLELTETIMKKSKHGSLLWVLDKTVTAMGARTLKKWLERPLLSKQKINERLEVVQGFYDGFMERESLRDLLKSVYDLERLSGRIAFGNVNARDLIQLKQSLSRIPAIQETLRQFDQPEITRLAEMLIYPEQMVESLEKSIVDEPPISIKEGSLIKEGYHDQLDTYRDASRNGKKWIAQLEHQEREETGIRSLKVGYNRVFGYYIEITKPNLHLLPEGRYERRQTLTNAERFVNEELKEKEKLILEAEEKSVELEYDLFIQIRDQIKEEIPLIQQLAHIISQMDVLQSFATVSESNNYVRPDFNDEQLQVTKGRHPVVEQVMKDGTFVPNDVVFDKSQNMLLITGPNMSGKSTYMRQVALTSIMGQIGCFIPAEQATLCVFDQIFTRIGAADDLVSGQSTFMVEMLEARHAISNATDRSLILLDEIGRGTSTYDGMALAQAIVEYIHHNIAAKTLFSTHYHELTALEDSLHHLKNIHVRAEEHEGNVVFLHQIKEGAADQSYGIHVAKLADLPNELIERASVILEELEDDSNKKPTPTKDKLESGQLSFFIEESNKKKAEMPKQEKTHNNQEQSVIEDLKNVNVLDLTPLEAMNELYRLQKGLKQY

SEQ ID NO: 4194 - DNA, 2577 bp, Protochlamydia amoebophila
  CDS (1)..(2577): transl_table=11
ttgtttatttttcaattaaaaataagtttatttatgtctgattttgaacaacattcccttgatgaaagtaaaatttcacccatgatgatgcagtggcacgcctgtaaaaaaatggcgggcgatgccattttattttttcggatgggtgatttttatgaagctttttatgaagacgctcatctgctatctaaggagttggagctgacattgactaaacggcaagaaattcccatgagtggaattccttttcatacaagtgaaggatatatcgataaacttgtcgctaaaggatttcgagttgccattgcagaacaaatagaagatcctaaaaaaactaaaggcttagtcaagcgcgaagttgttcgtgttgtgtctcctggaacagttattaactcctctcttctttccgacaaaaacaataatttttttgctgccttagtaaaagtggggcaaatttttggattagcttttttagatttgacgactggtgaatattgggtgagtgaatttacgcaagaaagagaacttttaaatgaactttatcgtttgcaccctgctgaatttttaacttctgaaaaattcaaagaaaaacatgcttctttgtttgaagaaatgcaacaaacatattcttttttagtcaatacattagaagactggcaatttgagcatcaacaagcacatgatttccttattaatcatttcaaggttcaacgcttagatggttttggactaagcggaatggttgcagctatcaatgccgcaggagctttattaaattatttacaagaaacactgtgtctaccaatccaacatattcaaagcattcgttgctattcttcttcccagtttatgatgttagatcgaatgacacagcgtaatctggaactaacgcattctctacaagacggaagtagacgtcatacattgctaggtgtcattgatcaaacgcagactcctatgggcgctcggctcatgcatcattgggttaagcaacctcttttaaaagtttctgagattcatcaaaggcaaaatggaatccaagctctattaaatcacgaacacattgtagatcaattacaaaatctattccttcaaattaaagatattgaacgcttgatgatgaaagtcagtgcttgctacgctacgcctcgggaccttatagctcttcatttttcttttaagcccattgcatttattaaatctcttttgttaaacattccttcagaatggataaatgagcacgcacaaaaacttgatcctctatctaaaatgaatgcattaatatccaatgcaatcgtagaagagccgcctctaagacttggtgaagggaaaacgttccgacaaggttttcatcgtgaattagatgaattgcgagaaatcagtcatgacagtaaagcttggatggctcgttaccaaactcaaatcagagaagaaaccggtattaaaaccctgaaagtaggttttaataaaatgtttggttattttatcgaagtcagtcgtggtcaaatagataaaatgcctgatcactttatacgtcgacaaacccttgttaatgctgaacggtatatcacacctgagttaaaagaatatgaaagcaaagtcttaacagcggaagaacgcatcaactctattgaaagtgaactttttcaccaacttcgtttagaagttgcttcatatactaaaaatgtattagaagtcgctcaagcattagctaaaattgattgtttaatatctttaaccaatgtagcaaaaaagtattgctacacatgtcctgtcattgatgacagctccattcttgtgatcgaagaaggaaggcatccagtaatcgagacagtgtgccggcatgaaaaatttattcccaatgacacgtatttagatgatcaagctaatcgattgctcttaatcacaggccctaacatggcaggaaaatcgacatatctgagacaagtagctttaattgtcattttagctcaaataggttctttcgttccagcagctaaagctcacataggaattatcgataaagtctttacacgaataggtgctagtgatgatttatctagaggacagtcaacttttatggttgaaatgactgaaacggcaaatattttaaacaatgccacttctcaatctctcgttattttagatgaaatcggtcggggaacaagtacatatgacggcatatcaattgcttggtctgtggcagaatatcttctaacaacagaaaaaaggatggctaaaacattatttgcaactcattactgggaacttacaaaattagaagagaaggttccaggtgctgttaattacaacgttgctgttcatgaagcggacgatcacattacatttctaagaaaaatcatcaaaggaggaactgacaaaagctatggaatccacgttgctcgcctagctgggcttccacaagccgttttaaaccgttctaaagaaattttagaacatttggaagaaaatgcgaatcgtaagagcgcttttgagcctacccgttcaaaaaagagtatggtttctaaagtaaaagttccttcaactgactttcaattgaacttatttcaatcataa

SEQ ID NO: 4195 - protein, 858 aa, Protochlamydia amoebophila
MFIFQLKISLFMSDFEQHSLDESKISPMMMQWHACKKMAGDAILFFRMGDFYEAFYEDAHLLSKELELTLTKRQEIPMSGIPFHTSEGYIDKLVAKGFRVAIAEQIEDPKKTKGLVKREVVRVVSPGTVINSSLLSDKNNNFFAALVKVGQIFGLAFLDLTTGEYWVSEFTQERELLNELYRLHPAEFLTSEKFKEKHASLFEEMQQTYSFLVNTLEDWQFEHQQAHDFLINHFKVQRLDGFGLSGMVAAINAAGALLNYLQETLCLPIQHIQSIRCYSSSQFMMLDRMTQRNLELTHSLQDGSRRHTLLGVIDQTQTPMGARLMHHWVKQPLLKVSEIHQRQNGIQALLNHEHIVDQLQNLFLQIKDIERLMMKVSACYATPRDLIALHFSFKPIAFIKSLLLNIPSEWINEHAQKLDPLSKMNALISNAIVEEPPLRLGEGKTFRQGFHRELDELREISHDSKAWMARYQTQIREETGIKTLKVGFNKMFGYFIEVSRGQIDKMPDHFIRRQTLVNAERYITPELKEYESKVLTAEERINSIESELFHQLRLEVASYTKNVLEVAQALAKIDCLISLTNVAKKYCYTCPVIDDSSILVIEEGRHPVIETVCRHEKFIPNDTYLDDQANRLLLITGPNMAGKSTYLRQVALIVILAQIGSFVPAAKAHIGIIDKVFTRIGASDDLSRGQSTFMVEMTETANILNNATSQSLVILDEIGRGTSTYDGISIAWSVAEYLLTTEKRMAKTLFATHYWELTKLEEKVPGAVNYNVAVHEADDHITFLRKIIKGGTDKSYGIHVARLAGLPQAVLNRSKEILEHLEENANRKSAFEPTRSKKSMVSKVKVPSTDFQLNLFQS

SEQ ID NO: 4196 - DNA, 2583 bp, Pasteurella multocida
  CDS (1)..(2583): transl_table=11
atggataatttagacttgcacacgcccatgatgcgccaatatttggcgctcaaagccgaaaatcccgatattttgttgttttatcggatgggtgatttttatgagcttttttatgacgatgccaagaaagcggcggcgttgctagatatttccttgactaaacgtggacagtccgctgggcaacctatcccaatggcgggcgtgccttatcatgcagtagaaggttatttagccaaattggtgcaattaggggagtcggtggcgatttgtgagcaagtgggtgatccggcgacttcaaaaggtcccgttgagcgccaagtcgtgcggattgtcacccccggtaccgtgagcgatgaaagcctcttacctgaacggcaagacaacttgatcgccacggtttaccaagaaaaagatcgctttggtttggcagtgttagacatcacctcggggcgttttcaaatcagtgagcccgaggatcgcgcgagcttacaagcggagttacagcgcatttcgcctgtagagttattgtattgtgaagactttgtggacatggcattgcttgagccgtttaaagggttacgccggcgtcctatttgggaatttgaactcggtacggcaattcaattactcaatcgtcagtttcacaccaaagatctgcgtggttttggggtggaaaaagccattttgggactctgtgcggcaggctgtttgttacaatatgccaaagatactcaacgtacggcattaccgcatattcaaagcctaaccttattacaacattcagaacatatacaattagatgccgccacgcgccgtaatttagagttaacccaaaatcttgccggtggcagcgaaaataccctcgcctcggtgctcgataaatgtgtcaccccaatgggaagccgtttattgaaacgttggatgcatcagcccattcgtcagcatgaaaaactcatggtgcgccaaaatcggattactgcccttttgcaacaggatttagtggcagcgattcagccttatttacagcaaatcggcgatatggaacggattttagcccgtgtcgctttgcgctcggcacgtccccgtgatttaactcgtttgcgtactgccttggaacaaattccgtatttgcgcgatattctggcacaacaaacttcgtcagatttgaccgcacttttgcagccaatcggtgaattttcagcgcagttagatttattacagcgtgccatcattgataatcccccaatgttaattcgtgatggtggcgtgattgctgaaggctacaatgcggaactagatgaatggcgcagtttatcggatggcgccacacgctatttagaagaactcgaacagcgtgagcgagaaagtaccgggattgatacgttaaaaatcggctttaatgcggtgcatggctactatattcaaattagccaagggcaagcgcataaggcaccgatgcactatgtgcgccgccaaaccctgaaaaatgcagaacgttatattattccagagctgaaaacgtacgaagataaagtgctgaaagctaaaggtgccgcattggcgttagaaaaacagctctacgaacaattatttgatgagttactgccacatttaggggcgttacaacttgccagtttaactttagcggaactggacgtgctcaccaatttagccgaacgagcagaaaccctcaattatgtcgcgccgcaatttagcgatgatatcggggtgcatattcagcaaggtcgtcatcctgtggtggaacaggtgctcaatgcgccgtttattgccaacccggttgagcttcacccacagcgccatttattgattatcacgggaccgaatatgggcgggaaaagcacttatatgcgtcaaactgccttgattacattaatggcgtatatgggcagttttgtgcctgcggaaagtgcggtgattggtccgattgatcgtattttcacccgtattggtgcgtcagacgatttggcgtcagggcgttcgacctttatggtggagatgaccgaaatggcgaatattttgcatcaagccaccgccaacagtttggtgttaattgatgaaattggacgcggtacctccacttacgatgggctttctttagcgtgggcttgtgcggaatggttggcgaaaaaattacgctcacttaccttatttgccacccattattttgagctgacggtgttacctgaacaactggcgggtagtgccaacgtgcatttagatgccatcgagcataatgacaccattgcttttatgcacgcggtgcaagagggggccgccagcaaaagttacggtttagccgtggcggcattggcgggcgtgccacaatcggtgattaaactggcgaaacaaaaattagcgcaattagaaaaactgtcacaacaaaatgccgatcaacgtatccaagatttgcgccagctcaatcaaacacaaggtgaattggcgttaatggaagaagatgacagcaaaacagccgtttgggaaatgttagaaaaactcgatcccgacgaactcagcccaaaacaagcgctggcgtatttgtatcagttgaagaagttggtttga

SEQ ID NO: 4197 - protein, 860 aa, Pasteurella multocida
MDNLDLHTPMMRQYLALKAENPDILLFYRMGDFYELFYDDAKKAAALLDISLTKRGQSAGQPIPMAGVPYHAVEGYLAKLVQLGESVAICEQVGDPATSKGPVERQVVRIVTPGTVSDESLLPERQDNLIATVYQEKDRFGLAVLDITSGRFQISEPEDRASLQAELQRISPVELLYCEDFVDMALLEPFKGLRRRPIWEFELGTAIQLLNRQFHTKDLRGFGVEKAILGLCAAGCLLQYAKDTQRTALPHIQSLTLLQHSEHIQLDAATRRNLELTQNLAGGSENTLASVLDKCVTPMGSRLLKRWMHQPIRQHEKLMVRQNRITALLQQDLVAAIQPYLQQIGDMERILARVALRSARPRDLTRLRTALEQIPYLRDILAQQTSSDLTALLQPIGEFSAQLDLLQRAIIDNPPMLIRDGGVIAEGYNAELDEWRSLSDGATRYLEELEQRERESTGIDTLKIGFNAVHGYYIQISQGQAHKAPMHYVRRQTLKNAERYIIPELKTYEDKVLKAKGAALALEKQLYEQLFDELLPHLGALQLASLTLAELDVLTNLAERAETLNYVAPQFSDDIGVHIQQGRHPVVEQVLNAPFIANPVELHPQRHLLIITGPNMGGKSTYMRQTALITLMAYMGSFVPAESAVIGPIDRIFTRIGASDDLASGRSTFMVEMTEMANILHQATANSLVLIDEIGRGTSTYDGLSLAWACAEWLAKKLRSLTLFATHYFELTVLPEQLAGSANVHLDAIEHNDTIAFMHAVQEGAASKSYGLAVAALAGVPQSVIKLAKQKLAQLEKLSQQNADQRIQDLRQLNQTQGELALMEEDDSKTAVWEMLEKLDPDELSPKQALAYLYQLKKLV

SEQ ID NO: 4198 - DNA, 2622 bp, Pediococcus pentosaceus
  CDS (1)..(2622): transl_table=11
atgccacaaaaaacaagtgatacgccaatgatgcgtcagtatatggaaattaaaaatcaataccccgatgctttcctattctatcgaattggtgatttttatgaattattttatgatgatgcggtcaaaggctcccagctattggaattaacgctaacagcgcgttctaaaaacgcagatgatccgattccaatgtgtggagttcctcatcatgcagcacaaaattatattgatatccttgtcgaccaaggatacaaagtggcaatttgtgaacagatggaagatccacggactgctaaaggaatggttaaacgtgaagttatccaattggttactccaggtacaacaactgataagagtgctgaggatgccaaagaaaataactatttgaccgctgttaattttgattctaaaactaaaaaatatggctttgcgtatacagatctttcaactggtgaattaaaagttgcgattttagatgattttgatagcgtgattaatgaagcagtaggattacagaccaaagaaatagtaactgacgaaagccttgcagaaagttttgaagaacgttttaaagagttaaatattttagtgtctaagcagagtgaagtggaaatatccgctgaattaagctatttaattcaagatttaacaagttcaacggaaatagaagttgttaagcaactacttacgtatgtgcaaactacgcagaaacgtaatttagctcatattcaaaaagcagtggcatatgaaccatctttctttttgagaatggaccatgcttccaagtataatttggaactaactcgtttaattcgtacaggaaaaaaacaaggaacattactgtggctgttggacgagactaaaacggcgatggggggacgtttactgaaacaatggttagatcgtcccttaatccgcaaaaaagaaattattagtcgccaagatcgagttcaggttttagtagatcatttttttgagcgtagtaatttacaagaagagttaacaaaagtttatgatttggaacggctagctggtcgcgttgcattcggtagcgtgaatggacgagatttaatccaactcaaaacatcattacttcaaattcctaaggtacgtcatattttagaggaacttagtgagccggtctttgatgatgctttagaacatttggatccggttagtgatattgctgagctaatccaaaatgctattgatgaagatgcaccaatttctgttacggatggagatattattaaagatggttaccatgctaagttagatgagtaccgagatgcaatgcgtaatggtaaaaaatggattgcggatttacaggcacaagaaagagcgacaacgggaattaagacattgaagattggttataacaaagtttttggttactatatcgaggtaaccagagccaatttagctaatattcctgaaggacgttatgaaagaaaacagactttaacaaatgcagagcgattcattacgccagaattaaaggaaaaagaacggattattctggaagctgaacaaaaatctacggatttggaataccaattatttaaagaaattcgagaattgatcaaaaaacaaattgaaagactgcaagatttagctaaacaagtggccgaattagatgtcctacagagctttgcggtggttagtgaaaaatatcagtttgttaaaccaaccatgaccaaaaatcatgcaatcgaaattaaagatggccggcatcccgttgtcgaaaaggtgatgggacatcagagttatgttccaaataatattgatatggatgataatacagacattctcttaattacgggacctaatatgtcgggtaaaagtacctatatgcggcaacttgctttgaccgtaatcatggctcagatgggatgttttgtagccgctagtgaggcaactttgccaatttttgatcaaatatttactcgaattggtgctgcagatgacctaatttccggacagagtacttttatggttgaaatgcaagaagcaaaccgagctttgaaggatggaaccagtaatagtttagttctttttgatgaaattggtcgtggtacagccacttatgatggaatggctttagctcaatctatcattgaatttattcatcaaaatgtccatgctaaaacgcttttttcgactcactatcacgagttaactgagctcgatcaatcactagaacatctcaaaaatgtccatgttggagcagtggaacaaaatggtaatcttgtctttcttcataaaatggaagacggccctgctgataaatcatacggaatccatgttgctaagctagcagggatgcctgataaacttttaaaacgtgcatccgtcattttagaaaaacttgaggctaaagatcaagctcattctgatggggttgagacaccagtctccaaagcaactccggttgaatcagagcaaacgccaaccatgattgaagaacaaatggctttgtttgaaacacctactaagccggttaaatcaagtcctaaagaagaagttgctaaccaactggaacagttaaatttaatggatatgactcccatggaagttatgaatcagttatataaatggcaaaagaaacttcgtaagtga

SEQ ID NO: 4199 - protein, 873 aa, Pediococcus pentosaceus
MPQKTSDTPMMRQYMEIKNQYPDAFLFYRIGDFYELFYDDAVKGSQLLELTLTARSKNADDPIPMCGVPHHAAQNYIDILVDQGYKVAICEQMEDPRTAKGMVKREVIQLVTPGTTTDKSAEDAKENNYLTAVNFDSKTKKYGFAYTDLSTGELKVAILDDFDSVINEAVGLQTKEIVTDESLAESFEERFKELNILVSKQSEVEISAELSYLIQDLTSSTEIEVVKQLLTYVQTTQKRNLAHIQKAVAYEPSFFLRMDHASKYNLELTRLIRTGKKQGTLLWLLDETKTAMGGRLLKQWLDRPLIRKKEIISRQDRVQVLVDHFFERSNLQEELTKVYDLERLAGRVAFGSVNGRDLIQLKTSLLQIPKVRHILEELSEPVFDDALEHLDPVSDIAELIQNAIDEDAPISVTDGDIIKDGYHAKLDEYRDAMRNGKKWIADLQAQERATTGIKTLKIGYNKVFGYYIEVTRANLANIPEGRYERKQTLTNAERFITPELKEKERIILEAEQKSTDLEYQLFKEIRELIKKQIERLQDLAKQVAELDVLQSFAVVSEKYQFVKPTMTKNHAIEIKDGRHPVVEKVMGHQSYVPNNIDMDDNTDILLITGPNMSGKSTYMRQLALTVIMAQMGCFVAASEATLPIFDQIFTRIGAADDLISGQSTFMVEMQEANRALKDGTSNSLVLFDEIGRGTATYDGMALAQSIIEFIHQNVHAKTLFSTHYHELTELDQSLEHLKNVHVGAVEQNGNLVFLHKMEDGPADKSYGIHVAKLAGMPDKLLKRASVILEKLEAKDQAHSDGVETPVSKATPVESEQTPTMIEEQMALFETPTKPVKSSPKEEVANQLEQLNLMDMTPMEVMNQLYKWQKKLRK

SEQ ID NO: 4200 - DNA, 2556 bp, Photorhabdus luminescens subsp. laumondii
  CDS (1)..(2556): transl_table=11
atgattaatacagaaaccttcgacacccacacgcccatgatgcagcaatatctccgtcttaaagcacagcatcctgatatcctgctgttttacagaatgggggatttctatgagctattttatgacgatgccaaaaaggctgcaaaattgctggatatttccctgaccaaacgaggtcaatccgctggcaatcctatccctatggcaggcgtgccacatcatgcagtagaaaactatttagctaagctggttcaattaggtgaatcagtcgctatctgtgagcaaattggcgatcctgccaccagcaaaggcccggttgaacgtaaagtcgttcgcatcgttactcccggtaccgtgacagatgaagcgctattacaggaacggcaagataatctgctggcggctatttggcacgataatcaaggctttggttatgccacactggatgtgacatctggccgcttccaaatatctgaaatgatagagctggaaacgatagccgctgaattgcaacgtagccgtcctgttgaattactctatcctgaaagttttgagcatatggcgctaattgaaaattttcatggcctgcgccgtcgccctttatgggaatttgagctagataccgcaaaacagcaattgaacctgcaatttggtacccgtgatctcgtcggttttggtgtggataaagcaactctcgctctgcgtgccgcgggttgcctgttgcaatacgtcaaagatactcaacgcacggcgctgccacatatccgtggtattacgatggagcgtcagcaagatacagttattatggatgccgcaacccgtcgtaatctggaactgacacaaaacctgtctggcagtacagataatactctcgcttctgttcttgatctgtgtgttaccccaatgggtagccgaatgttgaaacgttggttgcatgcgcctgtcagggaccgccagatattagaaaatcgtcaacaagctattgctaccttgcaggaaattgggctggagttgcagccatttttgctacagataggtgatcttgaacgtgtgctagcacgcttggctctacgttctgctcgtccaagggatctggcaagaatgcgccatgcattccagcaattaccggatatccatcaagttatggactcctcagattccccttatatcaagcaattgcagaaaaatatcggcaggtttgatgaattacaggaattgcttgaaaaagcgattgtagaaacacctccggtattaattcgggatggtggcgtaatcgcaccgggttataacagtgagctggatgagtggcgcacactggctgatggtgccagtaactatctggaacaactggaaatccgcgaacgagaaaagctgggccttgatactctaaaagtcggctttaatggtgttcatggctactatattcaagtcagccgagggcagagccatctggtgccaattcactatgtccgccgccagacactgaaaaatgctgagcgttatatcatccccgagttaaaagaatatgaagataaggttctgacctctaaagggaaatctctggcaatagagaaagcgctttacgaagaattattcgatctactgctgcctcatttggccgaattacaaaccagtgccgaagcactggctgaacttgatgtattggcaaatctggcagaacgcgctgaaaccctgaattatatttgcccaacattgagtgataaaccgggaattcaaatcactggtggtcgtcatccggttgttgagcaagttctgcgtgaaccatttatctcaaacccactctctttatcttcacagcggcgtctgctaattattaccggtccaaacatgggcggtaaaagtacctatatgcgtcaggcggcacttattacacttctggcctatatcggtagctttgtaccggctgaaaaagcagtcatcggcccagttgatcgtatatttacccgtgtaggtgcctccgatgatctggcatccggccgttcaaccttcatggtggaaatgaccgaaaccgccaatatcttgcacaatgcgacagaacaaagtttggtattgatggatgagattggccgaggcacatcaacctacgatggcctttctctggcatgggcatgtgcagaaaatctggcaaaccgcattaaagcaatgaccttgtttgccactcactattttgaactgaccacgttgccggaaaaacttgaaggcgtggtcaatattcatctggatgcggtagagcatggagataccatcgcatttatgcacagcgtacaagagggtgcagccagtaagagttacgggttggcagttgcttccctcgccggcgttccacgtgaagtgattaaacgggcgcgccagaaacttaaagagctggaatcgctatccaaccatgcaacggcaagtcatgtcgatacaccgcagcttgcgctattaacagaggaaacatcaccggcggttgaagcattagaaaatcttaatccagattcactgactccgcgtcaagcattagaatggatttatcgactaaaagatatggtgtaa

SEQ ID NO: 4201 - protein, 851 aa, Photorhabdus luminescens subsp. laumondii
MINTETFDTHTPMMQQYLRLKAQHPDILLFYRMGDFYELFYDDAKKAAKLLDISLTKRGQSAGNPIPMAGVPHHAVENYLAKLVQLGESVAICEQIGDPATSKGPVERKVVRIVTPGTVTDEALLQERQDNLLAAIWHDNQGFGYATLDVTSGRFQISEMIELETIAAELQRSRPVELLYPESFEHMALIENFHGLRRRPLWEFELDTAKQQLNLQFGTRDLVGFGVDKATLALRAAGCLLQYVKDTQRTALPHIRGITMERQQDTVIMDAATRRNLELTQNLSGSTDNTLASVLDLCVTPMGSRMLKRWLHAPVRDRQILENRQQAIATLQEIGLELQPFLLQIGDLERVLARLALRSARPRDLARMRHAFQQLPDIHQVMDSSDSPYIKQLQKNIGRFDELQELLEKAIVETPPVLIRDGGVIAPGYNSELDEWRTLADGASNYLEQLEIREREKLGLDTLKVGFNGVHGYYIQVSRGQSHLVPIHYVRRQTLKNAERYIIPELKEYEDKVLTSKGKSLAIEKALYEELFDLLLPHLAELQTSAEALAELDVLANLAERAETLNYICPTLSDKPGIQITGGRHPVVEQVLREPFISNPLSLSSQRRLLIITGPNMGGKSTYMRQAALITLLAYIGSFVPAEKAVIGPVDRIFTRVGASDDLASGRSTFMVEMTETANILHNATEQSLVLMDEIGRGTSTYDGLSLAWACAENLANRIKAMTLFATHYFELTTLPEKLEGVVNIHLDAVEHGDTIAFMHSVQEGAASKSYGLAVASLAGVPREVIKRARQKLKELESLSNHATASHVDTPQLALLTEETSPAVEALENLNPDSLTPRQALEWIYRLKDMV

SEQ ID NO: 4202 - DNA, 2571 bp, Photobacterium profundum
  CDS (1)..(2571): transl_table=11
gtgacagtaaaaggtttagaaacacacacacccatgatgcagcaatttttacgcattaaagctgaaaaccctgacactctactgttctatcgcatgggtgatttctacgaactcttttttgatgatgctaaaagagcatctcaactactggatattacgctgactaagcgtggttcatcaaatggtcaacccattcctatggcgggcttaccctatcatgctgtggaagggtatttagcaaagctagttcaacaaggtgtgtctgtcgctatttgtgagcaaattggcgatccagcaacaagtaaaggccctgtggatcgtcaagttgtacgtattgtgacaccgggtactgtcagtgatgaggcgttattaagcgaacgtcgagataacctagtggccgctatttatcaaaatagcaagggttttggctacgccacactggatattacctctggtcgtttcatgctctcagagcctgaaactgaagaagcaatgcaagcagaattgcaacgcaccagtccagcagagctgctgtaccctgaagacttcacacagatgcacataattgaagcgattaaagggacacgtcgtcgccctgtttgggagtttgatctagatactgcacgtcagcaattaaccatgcaatttggtacccgtgatttaattggctttggtgtcgaaaaaacggaacgtgggttatcggctgctgggtgtttactgcaatatgtgaaagatactcaacgaactgccttaccccatattcgggccattaccttagatagcaaagatcattcagttattttagatgctgcgacacgccgtaatttagaactgacccaaaacttatctggtggctttgataataccttagcatcggtacttgaccataccgctaccccgatgggcagccgcttattaaaacgctggttgcatcaacccattcgagataccaagcaactcaatcatcgcttagatgctatcgccgcatttaaagatacgggcatgtttattgaggttgctgaagtattacatcatatgggcgatctagaacgtattttagcgcgattagcactgcgttctgcgcgccctcgtgatttagcccgtatgcgtagcgcattacaatctctgcctcagctagccgatttattggctgatattgagcaaccccgtatcggagagttggcgaaatattctgcgccaatggacgaactctgtgaactgcttgaacgagcgattatagagaacccacccgttattattcgtgatggtggcgtattagcaccaggctataacgcggaattagatgaatggcgtgatcttgccgacggggcgaaaaaattccttgatgatctcgaaactcgagaacgagagcagcatggtattgatagtttaaaagtgggctttaatcaggttcacggtttctttatccaaattagccgaggacaaagccatttagcacccgatcactatgttcgccgccagaccttaaagaatgctgaacgttatattattcccgagctaaaagaacatgaagacaaggtacttagctctaaatctaaagccctaggtttagaaaagaaactgtgggaagaactgtttgatcagttattacctcacctagagcggctacaaaatgcagcgagtgccttaagtgaattagacgtattagccaaccttgcagaacgcgctgacaccctgaactattgccgaccggaattaaccgaccaaacaggtattgagattgcagctggtcgtcatccagttgtcgaacaagtactgagtgaaccgtttattgctaacccaacttctcttcaccatgatcgtcgcatgttaatcattaccggcccaaacatgggtggtaagtcgacctacatgcgtcaaacagcccttattgctcttatggcccacgttggttcgtttgtgccagcagaagccgttaaaataggctctctggatcgtatttttactcgaattggtgcatctgatgatttagcctctggtcgatctactttcatggtcgagatgactgaaacagccaatattcttcataatgcaacaagcaaaagtttagtcctgatggatgagataggtcgcggcaccagtacctatgatggcctgtcattggcatgggcaagtgctgaatggctagctgaaaaaatctcagcgatgactttatttgcaacccattacttcgaattaacagaattaccctccatgatggatggtttagccaatgtccatttagatgcggttgaacacggtgatgaaattgctttcatgcacgccgtgcaagaaggtgcggcaagtaaatcttatggattggccgttgccagcttagcaggtgtacctaaagcggttatcaaacgtgcgaaggctaagctaacccaactagaaacaacgggtcatcaacaagcgattaaaaacccatcaaaagcaccgagagaagagcagcagctgacgttgcttcctgaaccgagtgacgttgaagaagcattagccaaagtcaatcctgacgagatgacaccacgccaagcattagacgagctataccgattaaaggcattgatgtaa

SEQ ID NO: 4203 - protein, 856 aa, Photobacterium profundum
MTVKGLETHTPMMQQFLRIKAENPDTLLFYRMGDFYELFFDDAKRASQLLDITLTKRGSSNGQPIPMAGLPYHAVEGYLAKLVQQGVSVAICEQIGDPATSKGPVDRQVVRIVTPGTVSDEALLSERRDNLVAAIYQNSKGFGYATLDITSGRFMLSEPETEEAMQAELQRTSPAELLYPEDFTQMHIIEAIKGTRRRPVWEFDLDTARQQLTMQFGTRDLIGFGVEKTERGLSAAGCLLQYVKDTQRTALPHIRAITLDSKDHSVILDAATRRNLELTQNLSGGFDNTLASVLDHTATPMGSRLLKRWLHQPIRDTKQLNHRLDAIAAFKDTGMFIEVAEVLHHMGDLERILARLALRSARPRDLARMRSALQSLPQLADLLADIEQPRIGELAKYSAPMDELCELLERAIIENPPVIIRDGGVLAPGYNAELDEWRDLADGAKKFLDDLETREREQHGIDSLKVGFNQVHGFFIQISRGQSHLAPDHYVRRQTLKNAERYIIPELKEHEDKVLSSKSKALGLEKKLWEELFDQLLPHLERLQNAASALSELDVLANLAERADTLNYCRPELTDQTGIEIAAGRHPVVEQVLSEPFIANPTSLHHDRRMLIITGPNMGGKSTYMRQTALIALMAHVGSFVPAEAVKIGSLDRIFTRIGASDDLASGRSTFMVEMTETANILHNATSKSLVLMDEIGRGTSTYDGLSLAWASAEWLAEKISAMTLFATHYFELTELPSMMDGLANVHLDAVEHGDEIAFMHAVQEGAASKSYGLAVASLAGVPKAVIKRAKAKLTQLETTGHQQAIKNPSKAPREEQQLTLLPEPSDVEEALAKVNPDEMTPRQALDELYRLKALM

SEQ ID NO: 4204 - DNA, 2742 bp, Prochlorococcus marinus
  CDS (1)..(2742): transl_table=11
atgcaagaagatttgataattcaaaagaatttatttgcgattggtaatgataataataagcaaaaggaaaaaacaaaaattccagaagatttatctttagaagatttaaaaaaagaatcgcaaaaaagacccagacaaagaaaaaattcaactaatttaataaataaattcaagactgatttaatttcaaataagaaaaatgtttgcatcaatgaagaatcttatagctataaaacagtttcaaaactgaaattaacacctgtaatgaagcattatgtaactctaaaagaagaaaataaagataggttattactttatagattaggagatttttttgaatgtttttttgaggatgctgtattaatatctaatcttttagaaataacgcttaccagtaaagatgctggcaaagagattggtaagatccctatggcaggggttccccatcatgcaatggacagatactgtgctgatttaattaaaaaaaattattctgtggttatatgtgatcaattagaaaaaagttctggaaattatgggactccaattaaaagaggaataacacgaataattactcctggaactgtaattgaagaggggatgttgatagcaaagaaaaataattggattactgctatttacttatcagaagaaaactcaaatgaatcttatgaatggggtatatcaaaagctgatgtaagcacaggagaattaataactttagaaggccaatctctatcaaaactatttgatgaaattattaaattagattcttcagaaatcattgtaggaagcaatgcagtaagaaatttattaattaaaggaaatagtcaaattacatatactgtttctcaagagactaattttggaattaatgaagcaaattatctaataaaaaattatttccaaattgcaaacttagagggaataggacttaaaaatttaaaaaatgcaactagatcacttggaggtttattaaattatttagaaaaaattaatccttcaaatttagataaagattcttctgtaaaaatctcattagactttccacaaatccaatatggtcacaacaaattaattattgattatcaaactcaaaaaaacttagaaatcaaaaatacacaacgagaaaacaattatgtaggttcgctactatggagtattgatagaacttatacttgcatgggcgcaaggtgtttaagaaggtggatagattcaccactattaaacgttaatgaaatttataaaagacaaaatataattacaaacttttttgaatctaagaaattacgtacagatacccaaaatttacttagagcaatgggggatttagaaagacttgcaggtagagcttgtgcaggtcatgcaagtccaagagacttaattgcaatagctgaaggtttaaaaaaattgcctagactaaaatccataattgaattatttaaatatgatctcccaaattggactgatcaacttataaatattgatgaaggactcttagaattagctgatactataagttttaaactcgtagaaaatcctcctctaagtattagtgaaggaggcatgatccacgatggagttgacaatatattagatggtttacgcaatttaatggatgattactcagagtggctaaataaagaggaattaaaggaaaggaaaattagcaaaatttcaaacctaaaaattcaatttcataaaaattttggttattacatttctataaataagtcaaaagttaatttagctccacaacattggatcaaaaggcaaacacttactaatgaagaaaggtatatcacttcagaaattaaaaataaagaaaataagattttccaaataaaaagtagagcttcatcaaaagaatatgaaattttctgcgaattaagaaatatagttgctgaaaaaacaaaacaaataagatcaatcgcaaaatccatagcatctcttgatgcattgcttggtttatcaattacttcaatagaaaacaattttataaaacctttattaataccaataaatgattcaatgacaaaaaatagtacaaaaattatcgcaggaagaaatccaattgtagagcaattgttaagtgataaaaagtttgtagcaaacgatatttcttttgaggataatcaaaaattaattatattaaccggtcccaatgcaagcggaaaaagttgctttataagacaacttggtttaatacaaattctcgcacaaattggtagctttgttcctgctaataatgctgaaatcaagattgcagataggattttcacaagaattggggcagttgatgatcaatcatctgggcaatcaacatttatggtagaaatgtctgaaactgcatcaattctaaatcaagcaacttctaactcactagttttacttgatgagataggcagagggacatctacttttgatggactttcaatagcttggtcagtaagtgaatatcttgcaaaaaaaattcaatgtaatactatttttgctacgcactatcatgagcttaattatttaaaaaattcaaataagaatatacaaaattttcaagttttagtagaacaaaatgacgatcagctaatttttagccacagaattgttagagggggctcaaacaaaagctatggcatagaagcagctaaattagcaggagttccaaaagaagttatagaaaaagcaaaatcagttttaaattctttagaagaaaataacaagttaaatcataatattaagtag

SEQ ID NO: 4205 - protein, 913 aa, Prochlorococcus marinus
MQEDLIIQKNLFAIGNDNNKQKEKTKIPEDLSLEDLKKESQKRPRQRKNSTNLINKFKTDLISNKKNVCINEESYSYKTVSKLKLTPVMKHYVTLKEENKDRLLLYRLGDFFECFFEDAVLISNLLEITLTSKDAGKEIGKIPMAGVPHHAMDRYCADLIKKNYSVVICDQLEKSSGNYGTPIKRGITRIITPGTVIEEGMLIAKKNNWITAIYLSEENSNESYEWGISKADVSTGELITLEGQSLSKLFDEIIKLDSSEIIVGSNAVRNLLIKGNSQITYTVSQETNFGINEANYLIKNYFQIANLEGIGLKNLKNATRSLGGLLNYLEKINPSNLDKDSSVKISLDFPQIQYGHNKLIIDYQTQKNLEIKNTQRENNYVGSLLWSIDRTYTCMGARCLRRWIDSPLLNVNEIYKRQNIITNFFESKKLRTDTQNLLRAMGDLERLAGRACAGHASPRDLIAIAEGLKKLPRLKSIIELFKYDLPNWTDQLINIDEGLLELADTISFKLVENPPLSISEGGMIHDGVDNILDGLRNLMDDYSEWLNKEELKERKISKISNLKIQFHKNFGYYISINKSKVNLAPQHWIKRQTLTNEERYITSEIKNKENKIFQIKSRASSKEYEIFCELRNIVAEKTKQIRSIAKSIASLDALLGLSITSIENNFIKPLLIPINDSMTKNSTKIIAGRNPIVEQLLSDKKFVANDISFEDNQKLIILTGPNASGKSCFIRQLGLIQILAQIGSFVPANNAEIKIADRIFTRIGAVDDQSSGQSTFMVEMSETASILNQATSNSLVLLDEIGRGTSTFDGLSIAWSVSEYLAKKIQCNTIFATHYHELNYLKNSNKNIQNFQVLVEQNDDQLIFSHRIVRGGSNKSYGIEAAKLAGVPKEVIEKAKSVLNSLEENNKLNHNIK

SEQ ID NO: 4206 - DNA, 2781 bp, Prochlorococcus marinus
  CDS (1)..(2781): transl_table=11
atggctgccagcccaaacccactacaaggcagtctatttgaggaaagcaagcaaagcactactaatggagggaaagaaaccaataattcaataggatcttcagaaaatctttcaaatcaacaactaaaaagcgatgcatcactaagacctcgtatcagaaaaacgtctaaaaatccaaatcaaataaatgatctagatcagttatctaatgcggaaattgaagagccaaagtggtcacatcacaatttgccaaaaattgatgatctcactcctgctctaaaacattatgtgcaattaaaaatagagaatcctgatcgagttctgctgtataggcttggagacttctttgaatgtttttttgaagatgcaataacactttcacagttgctggaaatcacactcacaagtaaagaaggtggtaaaaaaatcgggaaagtccctatggctggaatccctcaccatgcatctgatcgttattgcacagaacttattaaaaaagggctatcaattgctatttgtgatcaacttgaagctgctccatcaaaaggtaataaattaataaaaagagggataactagattaataacccctggaacaattatagaagagggaatgctgagtgctaaacaaaataattggctggcttctgttttactagaatccgactcgaactcagattttgttaactggtctttagcaaagctagatgtaagcaccggtgaatttcttgtgcaagaaggtaaagagacaaataatttgcgtcaagaattaatcaaacttaaagcagctgaagtaatatcagaaagcaaatcaatctccaatcaaaactggtataaaggattaatagaaataaccgaatttaatcaaacatcattttctagattagaagcaaagacaactattgaaaatcattattttctcaataatattgatggattaggtattcatccagaatctctatcaattagaacaattggaggattaatagcatatttaaataaaactcatccaaatattggtaataacttgaaaaatgaagtaaagacaaatatatgtattgattttcctcaaataaaacataatcaggcggggctaattatagataatcaaacaagaagaaatttagaaatcacatcaactcaaaaaaatggtcaatttcagggttcattactatgggcaattgataaaacattaactgcaatgggtgggagatgtattaggaggtggttagaagagcctttaacagaaatttattcgatacaaagcagacaaaaaataattggtttactcgttgaatcatcaagcttaagaaaaaatatccgaaaaatattgagagctatgggcgatttagaacgtctatcaggcagggcaggagcccaacaagcaggagcacgtgatttaattgctatcgcagaaggtattaaccgtttacccttaattaaaaaatatcttaatgacccaatatttgaagaaacaaagtatttcgaatctattataaatttagatagggacttaatagaacttgcttcaaaaataaataatgagattatagataatcctcctcttagccttacagaaggtggtcttatttttgatggtgtaaatcctatacttgatggacttaggaatcaacttgatgatcataactcatggttaaaatctcaagaaatagaagaaaggaagaacagcaatattaataatttaaagcttcagtatcatcgttcgtttggatactttttagcagtaagtaaagcaaaatctatcaatgttccagatcactggataagaagacaaacattaactaatgaagaacgctttgttacaccagaactaaaagaacgagaaggaaagattttccaacttagagcacgtatatcacaacttgaatatgatcttttttgtaagcttagaattcttgttgggaataagtcagatattattagaaaagctgcaaaagcgatttcatgcttagatgttttatctggcttagccgaattagctgctacaaataactacattcaacctaaaattattgacaataaagattctaccaaaacaagaaggttatctattgttgatggtcgtcatcctgtagttgaacaaattcttgttgataaatttttcgtccctaatgatattgaacttggctctaagaccgatctaattattctttcagggccaaacgcaagtggcaaaagttgctatttaagacaagtaggtctcttacaaatcatggctcagatcggtagttggatcccagctaaatcagcaaatattggaatcgctgatcaattatttacacgtgttggagcagtagatgatttagcttcaggccaatcaactttcatggtggaaatgattgaaactgccttcattcttaataatgctactgaaaactcattagttttattagatgaaattggaagaggaacttcaacttttgatgggttatctattgcctggtcagtaagcgagtttctagcaaaaaaaattaaaagtcgttcaatctttgcaactcattaccatgaattgaatcaaatttctgaatatattgaaaatgtcgagaattacaaagttgtagttgaatataaaaatcattccctttcattccttcacaaggtcgaaaaaggaggagcaaataaaagttatggaattgaagctgcgaggcttgcgggagtccccccagacgtagtcaataatgcaagattgatattaaaaaatctagaaaaaaataactccaacaccattcaaatcactaagccaattgaaagttgcaaataa

SEQ ID NO: 4207 - protein, 926 aa, Prochlorococcus marinus
MAASPNPLQGSLFEESKQSTTNGGKETNNSIGSSENLSNQQLKSDASLRPRIRKTSKNPNQINDLDQLSNAEIEEPKWSHHNLPKIDDLTPALKHYVQLKIENPDRVLLYRLGDFFECFFEDAITLSQLLEITLTSKEGGKKIGKVPMAGIPHHASDRYCTELIKKGLSIAICDQLEAAPSKGNKLIKRGITRLITPGTIIEEGMLSAKQNNWLASVLLESDSNSDFVNWSLAKLDVSTGEFLVQEGKETNNLRQELIKLKAAEVISESKSISNQNWYKGLIEITEFNQTSFSRLEAKTTIENHYFLNNIDGLGIHPESLSIRTIGGLIAYLNKTHPNIGNNLKNEVKTNICIDFPQIKHNQAGLIIDNQTRRNLEITSTQKNGQFQGSLLWAIDKTLTAMGGRCIRRWLEEPLTEIYSIQSRQKIIGLLVESSSLRKNIRKILRAMGDLERLSGRAGAQQAGARDLIAIAEGINRLPLIKKYLNDPIFEETKYFESIINLDRDLIELASKINNEIIDNPPLSLTEGGLIFDGVNPILDGLRNQLDDHNSWLKSQEIEERKNSNINNLKLQYHRSFGYFLAVSKAKSINVPDHWIRRQTLTNEERFVTPELKEREGKIFQLRARISQLEYDLFCKLRILVGNKSDIIRKAAKAISCLDVLSGLAELAATNNYIQPKIIDNKDSTKTRRLSIVDGRHPVVEQILVDKFFVPNDIELGSKTDLIILSGPNASGKSCYLRQVGLLQIMAQIGSWIPAKSANIGIADQLFTRVGAVDDLASGQSTFMVEMIETAFILNNATENSLVLLDEIGRGTSTFDGLSIAWSVSEFLAKKIKSRSIFATHYHELNQISEYIENVENYKVVVEYKNHSLSFLHKVEKGGANKSYGIEAARLAGVPPDVVNNARLILKNLEKNNSNTIQITKPIESCK

SEQ ID NO: 4208 - DNA, 2784 bp, Prochlorococcus marinus
  CDS (1)..(2784): transl_table=11
atgactgccaacgctgagttgttgcaaggcagtctgtttggtgatctggaaccgcaggcaaacgctgaaagctgctcagaaaccattacacgggctctgcgtaacgatctctctgatcaagaactcgtcgacgaatccctaaaaaggccccgcaatcgacataagccaacatccgttccaagcatccctcttgattctgaaagccaagagcaactcgaaacagcagataacgacaacgacctgcccgcctgggcacaccacactctcgttgaccctgagcagctcacgccaatgctgcgtcactacgtggaactcaaggccaaacatcccgaaaggatcttgctctacagactcggcgatttttttgaatgcttttttgaagatgccattcagctctcaaggctgctggagctgactctcactggcaaggaaggaggtaaagggatcggccgtgtgccgatggcaggcgtcccccaccacgctgcagagcgctattgcaccgaattgatccgccatgggctaagcgtggccatttgtgaccaactggaaacaactccaagcaaaggcgcactgctcaaacgcgacatcaccagggtgctcaccccaggcacggtgcttgccgaaggcatgctgacagctcgccgcaacaattggctagcagcagttgtggttgagccagcacaaggcaaccaaccgttttgctggggtctagccaacgccgatgtcagcacaggcgaattcctggtcacgcaacgggaggggagcgctgagctgcaccaacaccttgctcagctcgaggcttcggaactgatcatggctcaaaagatcggagaaagcagcaggcctgcgtggtgtccggagcagctcttcctgacaacgatggccactacccccttcagtcagccagaggccgagcgcacgctgctcaatcattaccggctcagcacccttgacggtctagggctgcaagaggtccctttagcactaagggccgccggcggactgctgacttatctaagggacacccaacccctcgctgaaaacgtcgatgaaggcatcgccccgatgcccctggaacatccgctcacagtgttcgccggcgatgccttagtactcgacgcccaaacccgacgcaacttagaactcactagcacccaacgggatggccaattccaaggatcccttctttgggccgtagaccgtaccctcactgccatgggagcccgctgcctgcgccgctggatcgaggcccccctcctagacagcaaagccatccgcgcccgtcaagcggtggtgaaccatctcgtggaaacacgctcccttcggcattcactgcgacgcttgctgagaccgatgggagatctcgaacggctggccggcagggccggcgccggtcatgctggagcccgcgaactcgtggctatcgccgatggcattgaacgattaccacggctagcagagcaactacacaatgcattgcgctcagccccaaactggctcgacaacttgctgactctggataagagcctgccaaagctggcagcgagtatccgcgagcaattgatcaataacccaccgctcagcctcagcgagggaggcctcatgcacgacaacgttgatccgctactggatggcctgcgcaatcaactggatgaccaggacacctggcttgcaggtcaggaagtccaagaacgcaaactcagtggcaaccctaatctgcgcctgcaataccaccgaaccttcggctacttcctagccgtaagcaaagccaaggcttccatggtgccggaccactggatccgccggcagaccctggccaacgaggaacgcttcatcactccagatctcaaaacccgggaggggcagatcttccagctcagagcaagggcgtgccaacgggaatacgaactgttctgccaattgcgcgagcaagtgggaaaacaggcaacttcaatccgtaaagcagcccgggcagtggcaggactcgatgcgctagtcggcctagcagaagtagccgccactggagactattgctgcccagaaatcgataacagcagagaactacagctcaaaacctgcagacacccagtggtggaacaactactggtagagagatccttcatccctaacgatgtagaacttgggaaggacatcgacctcgtcgtactcacaggcccaaacgccagtggcaaaagctgctacctgcgtcaaatcggcctcatacagttgctagcccaggtaggtagttgggtgcctgcaaagcaggcccgtgttggcatcgcagaccgcatcttcacccgcgtcggcgccgtcgatgacctagcggcaggacaatccaccttcatggtggaaatggcagaaacggccaacattctccatcacgccagcgatcgttccttggtgcttctcgatgagattggacgtggcaccgccacctttgatggcctttcgattgcctgggcggtgagcgaacacctggcaagagatctaagaagccgcactgtgttcgcgacccattatcacgaactcaatgggctgagccaagaactgaccaatgtcgccaattctcaagttttggtggaggaaacaggcgacgacctggtgttcctacatcaggtggcggcaggcggtgcaaatcgcagttacggcattgaagccgcccgtctagctggtgtgcctgacgacgtggtacaacgagcaaggcaggtgttagctcagctccatgacgatgactcatctctgccagccctactaagcgcgaaaacaatcaaaagacaaagctga

SEQ ID NO: 4209 - protein, 927 aa, Prochlorococcus marinus
MTANAELLQGSLFGDLEPQANAESCSETITRALRNDLSDQELVDESLKRPRNRHKPTSVPSIPLDSESQEQLETADNDNDLPAWAHHTLVDPEQLTPMLRHYVELKAKHPERILLYRLGDFFECFFEDAIQLSRLLELTLTGKEGGKGIGRVPMAGVPHHAAERYCTELIRHGLSVAICDQLETTPSKGALLKRDITRVLTPGTVLAEGMLTARRNNWLAAVVVEPAQGNQPFCWGLANADVSTGEFLVTQREGSAELHQHLAQLEASELIMAQKIGESSRPAWCPEQLFLTTMATTPFSQPEAERTLLNHYRLSTLDGLGLQEVPLALRAAGGLLTYLRDTQPLAENVDEGIAPMPLEHPLTVFAGDALVLDAQTRRNLELTSTQRDGQFQGSLLWAVDRTLTAMGARCLRRWIEAPLLDSKAIRARQAVVNHLVETRSLRHSLRRLLRPMGDLERLAGRAGAGHAGARELVAIADGIERLPRLAEQLHNALRSAPNWLDNLLTLDKSLPKLAASIREQLINNPPLSLSEGGLMHDNVDPLLDGLRNQLDDQDTWLAGQEVQERKLSGNPNLRLQYHRTFGYFLAVSKAKASMVPDHWIRRQTLANEERFITPDLKTREGQIFQLRARACQREYELFCQLREQVGKQATSIRKAARAVAGLDALVGLAEVAATGDYCCPEIDNSRELQLKTCRHPVVEQLLVERSFIPNDVELGKDIDLVVLTGPNASGKSCYLRQIGLIQLLAQVGSWVPAKQARVGIADRIFTRVGAVDDLAAGQSTFMVEMAETANILHHASDRSLVLLDEIGRGTATFDGLSIAWAVSEHLARDLRSRTVFATHYHELNGLSQELTNVANSQVLVEETGDDLVFLHQVAAGGANRSYGIEAARLAGVPDDVVQRARQVLAQLHDDDSSLPALLSAKTIKRQS

SEQ ID NO: 4210 - DNA, 2745 bp, Prochlorococcus marinus
  CDS (1)..(2745): transl_table=11
atgactgccgaaaacactcctttacaaggaaacttgttcgttgaatctgaagaaaatttgttagatgcgaactcgttacaaaacacaaacagtgttaaggattcaaatctaaatgacgaagagctttctaaaaatgctgaattaagacctcgaaaaagaaagaaatcagttcttctacaaaatagtgttggggaacaaacggaagatttctctaatgatgaacgccctgcatggtctcatcacagtttagttgaaatcaatgaattaacccctgtcctacgtcattacgtagaactcaaacaaaaacaccctgaaagaatattgctctataggttgggagatttttttgagtgcttttttgaagatgcaatcggtttatctgaattattggaactaacactgactggaaaagaaggtggaaaaaaaattggaagagtgcctatggcaggtattccacaccatgcagcagaaagatactgctcaacccttatacaaaaaggtttatcagtagcaatatgtgaccaactagaaagtattcaaaataaagaagggaaacttctcaagagaggtattacaagaatccttactcctggaacagttcttgaagaaggaatgcttcaagcaaagaaaaataattggttagcagctatcttaattgaatcaaattctcagaccaatcaattgaaatgggggttggccagtgcagatataagtacaggggagtttactgttaaagaaggaaatggaattgatactctagagcaagatttattaaatattgaagcttcagagattatctgcgagcaactagatgttgacatctcaaaaaaatggcaatccaatcgtataaaaattactcaacaatctaagacgtcttttagtctgcaagaggctaaggcaattttaaaaaagcattataatctaaaaactattaatgggcttggattaaatgaaacagaattagctcttagagctgctgggggactattatattaccttaaggaaaccaacccaattcacaatataggagtaaagaataaatgttcaaaagttgtacttgactttcctaaaaataatttaagaggagattcattaataattgatgcgcaaactcgaagaaatttagaactaacaaaaactcagaaagatggacatttccaaggctcacttttatgtgcaatcgatcgaactcttaccgctatgggaggaaggtgcttacgacggtggattgaaaaccctctaattaattcagaattaattctgcaaagacaaagattaatcacactcctagtagagaaaagaccactaagaaaagcattgcgcaatttactaagaacgatgggagacatcgagcgcctttcaggtagagctagtgcaggtcaagctggagcaagagaactagtggcaattgctgattgcttagaaaaattaccgaaattggcagcgaatcttcaaaacctctcaatcaaccctcctaaatggttctctaaacttgaaaatataaatccagagcttacaaagctagcagaagaaattaaggataaattaatagacaaccccccattaagtattactgaaggtaatctaataaatgatagtgttgataagatattagatggtctcagaaaccagttggatgatcaaaatgaatggctatctaatcaggaaaaaaaagaaaggaacataagtggtaataataaccttaagcttcaacaccataggacttttggatattttttagcggtaagtaaatccaaggctaatactgttccagatcattggattagaagacaaactttagctaatgaagaaaggtttgttactcctgcattaaaagaaagagaaagtaaaatctttcaattaaaggtaaaagcagcaaaccgtgaatatgatttattttgtgccttgagggaattggttggtggttatgctccaataataagggaaacagcaaaagcaattgcaggtcttgatgttcttttaggccttgcagagttagcatcaacaaacaactattgtgcaccaaatattattgataaaaaaagcttatctaattctagaagtattaatataaaaggatgcaggcaccctgtagtagagcaaatgttagttgaggaaaaatttcaagcaaatgacattgagttaggtgatggggtcgatttaataatacttacaggtcctaatgctagtggaaaaagttgttatttaagacaaataggtctgattcaaatattatctcaaattggaagttggattccagcagataaagcttctatcagtattgcagatagagtttttactagagttggagcagtagatgatttagcagctggtcaatcaacgtttatggtagagatggcagagactgcttttatcttaaatcaagctacacaagattctatagttttattagatgaaattgggagaggaacctctacatttgatggtctttcaatagcatggtcagtcagtgaatttcttgcagaaaatattaaaagtcgtactatctttgcaacgcattatcacgagctaaatgagcttgcaaaaaaaatgggaaatgttgctaatttccaagttcttgtacacgaaactggagaagatatacatttccttcatcaagtaattccaggaggttcaaatagaagttatggaattgaagctgctcgtttagctggcgttcctaaaagtgtaattaatagagcaagaggagtgcttaaaagattagaagaaaaaaataaaggttga

SEQ ID NO: 4211 - protein, 914 aa, Prochlorococcus marinus
MTAENTPLQGNLFVESEENLLDANSLQNTNSVKDSNLNDEELSKNAELRPRKRKKSVLLQNSVGEQTEDFSNDERPAWSHHSLVEINELTPVLRHYVELKQKHPERILLYRLGDFFECFFEDAIGLSELLELTLTGKEGGKKIGRVPMAGIPHHAAERYCSTLIQKGLSVAICDQLESIQNKEGKLLKRGITRILTPGTVLEEGMLQAKKNNWLAAILIESNSQTNQLKWGLASADISTGEFTVKEGNGIDTLEQDLLNIEASEIICEQLDVDISKKWQSNRIKITQQSKTSFSLQEAKAILKKHYNLKTINGLGLNETELALRAAGGLLYYLKETNPIHNIGVKNKCSKVVLDFPKNNLRGDSLIIDAQTRRNLELTKTQKDGHFQGSLLCAIDRTLTAMGGRCLRRWIENPLINSELILQRQRLITLLVEKRPLRKALRNLLRTMGDIERLSGRASAGQAGARELVAIADCLEKLPKLAANLQNLSINPPKWFSKLENINPELTKLAEEIKDKLIDNPPLSITEGNLINDSVDKILDGLRNQLDDQNEWLSNQEKKERNISGNNNLKLQHHRTFGYFLAVSKSKANTVPDHWIRRQTLANEERFVTPALKERESKIFQLKVKAANREYDLFCALRELVGGYAPIIRETAKAIAGLDVLLGLAELASTNNYCAPNIIDKKSLSNSRSINIKGCRHPVVEQMLVEEKFQANDIELGDGVDLIILTGPNASGKSCYLRQIGLIQILSQIGSWIPADKASISIADRVFTRVGAVDDLAAGQSTFMVEMAETAFILNQATQDSIVLLDEIGRGTSTFDGLSIAWSVSEFLAENIKSRTIFATHYHELNELAKKMGNVANFQVLVHETGEDIHFLHQVIPGGSNRSYGIEAARLAGVPKSVINRARGVLKRLEEKNKG

SEQ ID NO: 4212 - DNA, 2784 bp, Prochlorococcus marinus
  CDS (1)..(2784): transl_table=11
atgactgccaacgctgagttgttgcaaggcagtctgtttggtgatctggaaccgcaggcaaacgctgaaagctgctcagaaaccatcgcaagagctctgcgtaacgatctctctgatcaagaactcgtcgacgaatccctaaaaaggccccgcaatcgacataacccaacatccgttccaagcatcccacttgattctgaaagccaagagcaactcgaaacagccgataacgacaacgacctgcccgcctgggcacaccacaaccttgttgaccctgagcagctcacgccaatgctgcgtcactacgtggaactcaaggccaaacaccccgaaaggatcttgctctacagactcggcgatttttttgaatgcttttttgaagatgccattcagctctcaaggctgctggagctgactctcactggcaaggaaggaggtaaagggatcggccgtgtaccgatggcaggcgtcccccaccacgctgcagagcgctattgcgccgaattgatccgccatgggctaagcgtggccatttgtgaccaactggaaacaactgcaagcaaaggcgcactgctcaaacgtgacatcaccagggtgctcaccccaggcacggtgcttgccgaaggcatgctgacagctcgccggaacaattggctagcagcagttgtggttgagccagcacaaggcaaccaaccgttttgctggggtctagcaaacgccgatgtcagcacaggcgaattcctgatcacgcaacgggaggggagcgctgagctgcaccaacaccttgctcagctcgaggcttcggaactgatcatggctcaaaagatcggagaaagcagcaggcctgagtggtgtccggagcagcttttcctgacaacgatggccactacccccttcagccagccagaggccgagcgcacgctgctcaatcattaccggctcagcacccttgacggtctaggtctgcaagaggtgcctttagcactaagggccgccgggggactgctgacttatctaagggacacccaacccctcgctgaaaacgtcgatgaaggcatcgccccgatgcccctggaacatccgctcacagtgttcgccggcgatgccttagtactcgacgcccaaacccgacgcaacctagaactcactagcacccaaagggatggccaattccaaggatcccttctttgggccgtagaccgtaccctcactgccatgggagcccgctgcctgcgccgctggatcgaggcccccctcctagacagcaaagccatccgcgcccgtcaagcggtggtgaaccatctcgtggagacacgctccctgcggcattcactgcggcgcttcctgcgaccgatgggagatctagaacgactggccggcagggcaggcgccggtcatgctggtgcccgcgaactcgtggctatcgccgatggcattgaacgattaccacggctagcagagcaactacacaatgcattgagctctgccccacactggctcgacaacttgctgactcttgataagagcctgccaaagctggcggcgagtattcgcgagcaattgatcaataacccacctctcagcctcagcgagggaggcctcatgcacgacaacgtcgatccactgctagatggcctgcgcaatcaactggatgaccaagacacctggcttgcaggccaggaaatccaagaacggaaactcagtggcaaccctaatctgcgcctgcaataccaccgaaccttcggctacttcctagccgtaagcaaagccaaggcttccatggtgccggaccactggatccgccggcagaccctggccaacgaggaacgcttcatcactccagatctcaaaacccgggaagggcagatcttccagctcagagcaagagcgtgccaacgggaatacgaactgttctgccagttgcgtgagcaagtgggaaaacaggcaacttcaatccgtaaagcagcccgggccgtggcaggactcgatgccctagtcggccttgcagaagtagccgccactggagactattgctgcccagaaatcgatgacagcagagaactacagctcaaaacctgcagacacccagtggtggaacaactactggtagagagatccttcatcgctaacgatgtagaacttggcaaagacatcgacctcgtcgtactcacaggtccaaacgccagtggcaaaagctgctacctgcgtcaaatcggcctcatacagttgctagcccaggtgggtagttgggtgcctgcaaagcaggcccgtgttggcatcgcagatcgcatcttcacccgcgtcggcgccgtcgatgacctagcggcaggacaatccaccttcatggtggaaatggcagaaacggccaacattctccatcacgccagcgatcgttccttggtgcttctcgatgagattggacgtggcaccgccacctttgatggcctttcgattgcctgggcggtgagcgaacacctggcaacagatctaagaagccgcactgtgttcgcgacccactatcacgaactcaatgggctgagccaagagctgaccaatgtcgccaattttcaagttttggtggaggaaacaggcgacgacctggtgttcctacatcaggtggccgcaggtggtgcaaatcgcagttacggcattgaagccgcccgtctagctggtgtgcctaatgacgtggtgcaacgagcaaggcaggtgttagctcagcttcaagacgatggctcatctctgccagccctgccaagcgcgaaaacaatcaacagaccaagctga

SEQ ID NO: 4213 - protein, 927 aa, Prochlorococcus marinus
MTANAELLQGSLFGDLEPQANAESCSETIARALRNDLSDQELVDESLKRPRNRHNPTSVPSIPLDSESQEQLETADNDNDLPAWAHHNLVDPEQLTPMLRHYVELKAKHPERILLYRLGDFFECFFEDAIQLSRLLELTLTGKEGGKGIGRVPMAGVPHHAAERYCAELIRHGLSVAICDQLETTASKGALLKRDITRVLTPGTVLAEGMLTARRNNWLAAVVVEPAQGNQPFCWGLANADVSTGEFLITQREGSAELHQHLAQLEASELIMAQKIGESSRPEWCPEQLFLTTMATTPFSQPEAERTLLNHYRLSTLDGLGLQEVPLALRAAGGLLTYLRDTQPLAENVDEGIAPMPLEHPLTVFAGDALVLDAQTRRNLELTSTQRDGQFQGSLLWAVDRTLTAMGARCLRRWIEAPLLDSKAIRARQAVVNHLVETRSLRHSLRRFLRPMGDLERLAGRAGAGHAGARELVAIADGIERLPRLAEQLHNALSSAPHWLDNLLTLDKSLPKLAASIREQLINNPPLSLSEGGLMHDNVDPLLDGLRNQLDDQDTWLAGQEIQERKLSGNPNLRLQYHRTFGYFLAVSKAKASMVPDHWIRRQTLANEERFITPDLKTREGQIFQLRARACQREYELFCQLREQVGKQATSIRKAARAVAGLDALVGLAEVAATGDYCCPEIDDSRELQLKTCRHPVVEQLLVERSFIANDVELGKDIDLVVLTGPNASGKSCYLRQIGLIQLLAQVGSWVPAKQARVGIADRIFTRVGAVDDLAAGQSTFMVEMAETANILHHASDRSLVLLDEIGRGTATFDGLSIAWAVSEHLATDLRSRTVFATHYHELNGLSQELTNVANFQVLVEETGDDLVFLHQVAAGGANRSYGIEAARLAGVPNDVVQRARQVLAQLQDDGSSLPALPSAKTINRPS

SEQ ID NO: 4214 - DNA, 2748 bp, Prochlorococcus marinus subsp. pastoris
  CDS (1)..(2748): transl_table=11
atggaagaagatacaataattcagaaggatttatttgcaattaatcatgaacttaaacgcccaaacaactcaagtcaaatacctgatgatttatctactgaagaattaaaaaaagagtcgcagaaaaggcccagacaaagaaaaaattctactaatttaataaacaaattcaaaaataattcaaattcagaaagaaagaatgattgcattaatgaaaagtcttacagttataaaaccgttgaaaaacaaaaattaactccaattctcaaacattatgtgacattaaaagaagaaaacagcaatagattgttgttatatagattaggtgacttttttgaatgtttttttgaagatgctgtattcatatctaacctattagaaataaccttaacgagcaaagatgcgggtaaagatattggtaaaattcctatggcaggagtcccttatcatgcaatggagagatactgcgccgaattaattaaaaaaaaccattcagtagttatatgtgatcagttagaaaaaagtactggaaattacggaacaccactgaaaaggggcataaccagaataattacgccagggactgtaattgaagaagggatgttggttgcaaaaaaaaataattggataactgcaatccacttatcagaaaacatttcagaaaacttatatgaatggggtatttcaagagctgatgtgagtacaggagaattattaacaatggagggtcaatcaatctctaaattattcgatgaaattattaaattagatacatcagaaatcatcataggaagcaatgaagagaaaaagttattagaaaaccaaaatcaacaaattacatatactgtcacccaagaaacttttttcagtattaatgaagcatgtttaactataaaaaactattttcaaattcttagtttagagggcctaggactcaagcatttaaataatgcgactaaagcacttggtggcttactaaattatttagagaaaataaatccttcaaatttagagaacgattcttctttaaaaatttctttagattttccacaaatacaatttccaaaagatcatttaattattgattatcaaactcaaaaaaatttagaaataaaaaatacacaaagagaaaataattatgctggttcacttctgtggagtattgatagaacatatacctgtatgggtgcaagatgtttaagaagatggatagactctccattattaaatattgatgaaattaataaaagacaaaatattatttcaaactttttagagtctaaaaagttgcggacagacacccaaaatatacttagagcaatgggcgatttagagagactttcagggcgagcatgtgcggggcatgccagtccaagagatttaattgcaatctcagagggattaaaaaaattacctagattaaagtcaattgttaaattatttaagtatgaaatcccatcctggacgaatcaattaaaaaatattgataatgagcttttagagttagcagatctaataagcttcaagctagtacaaaatccacctttaaatactagtgaaggaggcattatccatgatggggttgataatgtgttggatggcttacgtaatttaattgacgactactcagattggttgaatcaagaagaattaaaagaaagaaaaattagtaaaatatcaaatttaaaaattcaattccataaaaactttggttattacatatcaattaataaatctaaagttaatttagcacctgctcattggattaaaaggcaaactcttactaatgaggaaagatatgtaaccacagaaatcaagaatagagaaagtaaaatatttcaagtcaaaaatcgcgcggctgctaaagaatatgaattattttgcgaagtaagaaatcttgtatccgccaaaacaaaaaggattagatccgtagcaaaagctattgcctgtatagatgcattacttggtttagcaattacatcattagaaaataattttataaaaccgactatttcacccattactaattcaacagaccaacaaagcacaaagattattggaggaaggaatcctatagttgaacaactattaactaatagaaaatttatatctaatgatattttgtttaataataagcaaaaattaatcatattaactggtccaaatgcaagtggaaagagttgttttattagacaaataggattaatacaaattctggctcaaattggaagtttcgtgcctgcaagcaaagccgatattcaaattgtagatcgaatttttacaagaattggagccgtagatgatcaatcaactggacaatcgacattcatggtagaaatgtcagaaacagcatcaatactaaatcaagcgacatcaaactctcttgtcttacttgatgagataggaagagggacctctacttttgatgggttatccatagcatggtcagtaagtgaatatcttgcaaaaaaaattgtatgtaatacaatctttgccactcattatcatgaactaaattatcttaaacatacaaatacaaacgtagaaaattttcaggtattagtaaaacagaagaaagatcaactatttttttgtcataaaattgaaaaaggtggtgcgaacaaaagttatggaattgaagccgctaaattagccggggttcctaaagaagttattaataaagctattttagttttagattatttagaaaaaaataatcagttgaatgctcaaattaaaattaaataa

SEQ ID NO: 4215 - protein, 915 aa, Prochlorococcus marinus subsp. pastoris
MEEDTIIQKDLFAINHELKRPNNSSQIPDDLSTEELKKESQKRPRQRKNSTNLINKFKNNSNSERKNDCINEKSYSYKTVEKQKLTPILKHYVTLKEENSNRLLLYRLGDFFECFFEDAVFISNLLEITLTSKDAGKDIGKIPMAGVPYHAMERYCAELIKKNHSVVICDQLEKSTGNYGTPLKRGITRIITPGTVIEEGMLVAKKNNWITAIHLSENISENLYEWGISRADVSTGELLTMEGQSISKLFDEIIKLDTSEIIIGSNEEKKLLENQNQQITYTVTQETFFSINEACLTIKNYFQILSLEGLGLKHLNNATKALGGLLNYLEKINPSNLENDSSLKISLDFPQIQFPKDHLIIDYQTQKNLEIKNTQRENNYAGSLLWSIDRTYTCMGARCLRRWIDSPLLNIDEINKRQNIISNFLESKKLRTDTQNILRAMGDLERLSGRACAGHASPRDLIAISEGLKKLPRLKSIVKLFKYEIPSWTNQLKNIDNELLELADLISFKLVQNPPLNTSEGGIIHDGVDNVLDGLRNLIDDYSDWLNQEELKERKISKISNLKIQFHKNFGYYISINKSKVNLAPAHWIKRQTLTNEERYVTTEIKNRESKIFQVKNRAAAKEYELFCEVRNLVSAKTKRIRSVAKAIACIDALLGLAITSLENNFIKPTISPITNSTDQQSTKIIGGRNPIVEQLLTNRKFISNDILFNNKQKLIILTGPNASGKSCFIRQIGLIQILAQIGSFVPASKADIQIVDRIFTRIGAVDDQSTGQSTFMVEMSETASILNQATSNSLVLLDEIGRGTSTFDGLSIAWSVSEYLAKKIVCNTIFATHYHELNYLKHTNTNVENFQVLVKQKKDQLFFCHKIEKGGANKSYGIEAAKLAGVPKEVINKAILVLDYLEKNNQLNAQIKIK

SEQ ID NO: 4216 - DNA, 2781 bp, Prochlorococcus marinus
  CDS (1)..(2781): transl_table=11
atggctgccagccaaaaccctatacaaggcagtctatttggggggaatgaggaaagcgatctcaataaagctgaaaagctgaaaggttcagaaagatcgaacgtaaatctgtcacatcaacaactaaaagaagacgcatcgcttagacctcgcataaaacagactcctaaaaatccaaatcagataattgatttggatgagttgtctcgtctggcaattgaggaacccaaatggtcacatcacaatttaccaaaaattgatgatctcactcctgcactgagacattatgtcgaattaaaaaaagagaatcctgaccgagttttgctttataggcttggagacttcttcgaatgtttttttgaagatgcaataacactctcaaaacttttagaaatcacactcacaagtaaagaagctggaaaaaaaattggcaaaattccaatggctggaattcctcatcatgcatctgatcgttattgcacagaactaattaaaaaaggtttatctattgctatttgtgatcaacttgaagctgctccaacaaaaggcaataaattaataaaaagaggcataacaagattaataacccctggaacaattctagaagagggaatgttaagtgctaaaaaaaataattggctagcttctgttcttctagaagccaaatctaatcaagaaataattgactggtctttagcaaaaatagatgtaagcaccggtgaatttattgttcaagaaggtcaaggaagtaataatttacgacacgaattaattaaattgaatgcagctgaagttatttcagagaaaaagtcaatctcaaataaaatctggtatgaaggattaatagaaataacagaatttaatagaacatcattctctaatttagaggcaataacaactattaaaaatcattattgtctaaataatattgatagcctagggatacattctaactcactatcaattaggactattggaggattaatttcatatttaaataaaacgcacccaaatatagatgataaatctaacaatgaaataaaaacaaatatctgtattgactaccctcgaataaaaaatagtcgatcaggattaattatagatagtcaaacaagaagaaatttagaaattacctcaactcagaaggatggaaaatttcaaggctcattactttgggcaattgataaaacattaactgcaatgggtgcgagatgcattaggaggtggatagaagaacctacaaaagatgttaatgcaattaaaaatagacagaatataattggatttctagtcaaatcatcgacattaagaaaaaatattagaaaaacccttagagccatgggtgacttagaacgtctttcaggtagagcaggagctcaacaagcgggagcacgtgatttagttgctatcgcagaaggaattaaccgtttacccttaattaaaaattatctaaatgagcccatatttgataaaactaagtattttgactctattataaatatagataaagacttaatagaacttgcatcaaaaatcaataatcaaatcatagacaatccaccacttagccttacagaagggggtctattttatgatggtataaaccctgtacttgatggactaagaaaccaactagatgatcataatatatggctcaactctcaggaattagaagagagaaagaaaagcaatataaataatttaaagcttcaatatcatcgatcttttggatactttttagctgttagcaaatcaaaggctataaatgttccagatcactggatcagaagacaaaccttaactaatgaagaacgttttgtgacaccaggattaaaagaaagagaaggaaaaatctttcaagttagagcaagaatatcagaactagaatatgaacttttttgtgatttaagaaaacttacagggagtaaatcaaacattattagacaagctgcaaaagcaatatctcacttagatgttttaactggactagccgaactagccgctaatcacaactatattcaacctcagataatagatatgaatgagcaagataaatcaagaaaattatctattattgatggccgtcatcctgtagttgaacaaattttagttgataaagtttttgtacctaatgatatagaacttggctctaagaccgatctaattattctttcagggccaaatgctagtggaaaaagttgttatttaagacaagtaggtctcttgcaaatcatggctcaaattggaagttggatcccagctaaatcagcacatatgggaatagctgatcaagtatttacacgtgttggagcagtggatgatttagcttcaggccaatcaactttcatggtcgaaatgattgaaactgccttcattcttaataatgctactgaaaactcattagttttattagatgaaattggaagaggaacttcaacttttgatgggctatctattgcctggtcagtaagcgagtttttagcaaaaaaaattaaaagtcgttcaatctttgcaactcattaccatgaattgaatcaaatttctgaatatattgaaaatgtcgagaattacaaagttgtagttgaatataaaaatcattccctttcattccttcacaaggtcgaaagaggaggagcaaataaaagttatggaattgaagctgcgaggcttgcgggagtccccccagacgtagtcaataatgcaagattgatattaaaaaatctagaaaaaaataactccaacaccattcaaatcactaagccaattgaaagttgcaaataa

SEQ ID NO: 4217 - protein, 926 aa, Prochlorococcus marinus
MAASQNPIQGSLFGGNEESDLNKAEKLKGSERSNVNLSHQQLKEDASLRPRIKQTPKNPNQIIDLDELSRLAIEEPKWSHHNLPKIDDLTPALRHYVELKKENPDRVLLYRLGDFFECFFEDAITLSKLLEITLTSKEAGKKIGKIPMAGIPHHASDRYCTELIKKGLSIAICDQLEAAPTKGNKLIKRGITRLITPGTILEEGMLSAKKNNWLASVLLEAKSNQEIIDWSLAKIDVSTGEFIVQEGQGSNNLRHELIKLNAAEVISEKKSISNKIWYEGLIEITEFNRTSFSNLEAITTIKNHYCLNNIDSLGIHSNSLSIRTIGGLISYLNKTHPNIDDKSNNEIKTNICIDYPRIKNSRSGLIIDSQTRRNLEITSTQKDGKFQGSLLWAIDKTLTAMGARCIRRWIEEPTKDVNAIKNRQNIIGFLVKSSTLRKNIRKTLRAMGDLERLSGRAGAQQAGARDLVAIAEGINRLPLIKNYLNEPIFDKTKYFDSIINIDKDLIELASKINNQIIDNPPLSLTEGGLFYDGINPVLDGLRNQLDDHNIWLNSQELEERKKSNINNLKLQYHRSFGYFLAVSKSKAINVPDHWIRRQTLTNEERFVTPGLKEREGKIFQVRARISELEYELFCDLRKLTGSKSNIIRQAAKAISHLDVLTGLAELAANHNYIQPQIIDMNEQDKSRKLSIIDGRHPVVEQILVDKVFVPNDIELGSKTDLIILSGPNASGKSCYLRQVGLLQIMAQIGSWIPAKSAHMGIADQVFTRVGAVDDLASGQSTFMVEMIETAFILNNATENSLVLLDEIGRGTSTFDGLSIAWSVSEFLAKKIKSRSIFATHYHELNQISEYIENVENYKVVVEYKNHSLSFLHKVERGGANKSYGIEAARLAGVPPDVVNNARLILKNLEKNNSNTIQITKPIESCK

SEQ ID NO: 4218 - DNA, 2580 bp, Pseudomonas syringae pv. phaseolicola
  CDS (1)..(2580): transl_table=11
atgaataaagcaatttccgacctctcctcacatacccccatgatgcagcagtactggaaactcaaaaaccagcacctggatcaactgatgttttatcgcatgggcgatttctacgagatcttctacgaagacgcgaagaaagccgccaagttgctggacatcaccctgaccgcgcgcggtcagtcggcaggccagagcatccccatgtgcgggattccttaccacgccgccgaaggctatctggccaaactggttaagctgggcgaatcggtcgtgatctgcgagcagatcggcgacccggccaccagcaagggcccggtggatcgtcaggtggtccgcatcattacgcccggaaccatcagcgacgaggccttgctcgatgagcgcagggataacctgattgccgccgtactgggtgacgaacgcctgttcggcctcgccgtgctggacatcaccagcggcaacttcagtgtgttggagatcaagggttgggagaacctgctggccgagcttgaacgcatcaacccggtcgagctgttgattccggacgactggccgcaaggtctgcctgccgaaaaacgccgtggtgcgcgacgtcgtgcgccgtgggatttcgagcgcgactcagcccataaaagtctgtgtcagcagttttcaacccaggacctgaagggttttggttgcgaaaacctgacactcgccatcggtgctgcgggctgcctgctcagctacgccaaggaaacccagcgtaccgccctgccccacttgcgcagcctgcgccacgaacgcctcgacgatacggtaatcctcgatgcagccagtcggcgcaaccttgagctggacaccaacctgtccggtggccgcgacaatacgctgcaatcggtcatggaccgttgccagacggcgatgggaacgcggctgctgacccgctggctgaaccggccgttgcgcgacctgacgattcttcaggcacgccagacgtccattacctgctttctggagcgctaccgcttcgagaacctgcagccgcagctcaaggaaatcggcgacatcgagcggattctggcgcgtatcggcctgcgtaatgcgcgaccacgagaccttgcccgtctgcgcgatgcccttagcgctctgcccgaactgcaacaggcaatgaccgatcttgaagcgccgcacctgcaacaacttgcgcagaccgccagcacctatccggaactcgctgatctgctgcagcgcgcgatcatcgacaatccgcctgccgtgatacgcgacggcggtgttctgaagactggttacgacgctgagctggatgatctgcaatcgctgagtgaaaacgccggtcagttcctgatcgatctggaagcccgcgaaaaggcccgtaccggtcttgccaacctgaaagtcggttacaaccgcgtgcacggctacttcatcgagttgccgagcaaacaggccgagcaggccccggctgattacatacgccgccagaccctcaagggggccgagcgctttatcacgcccgagctcaaggaattcgaagacaaggcgttgtcggccaaaagccgcgcactggctcgggaaaagatgctctacgaagcgctgcttgaagacctgatcggccatctagcgccgctgcaggacacggcagcggcgctggctgagctggacgtgctgagcaaccttgcggagcgcgcgctgaatctggacctcaactgcccacggttcgttgccgaaccctgtatgcgcatcgagcagggccgtcacccggtcgtagagcaggtactgagtaccccgtttgtcgccaacgacctggcgctggacgacagcacgcgcatgctggtcattaccggcccgaacatgggcggtaaatcgacctatatgcgtcagacggcgctgattgtactgctggcgcatatcggcagtttcgtgcccgctgccagctgcgaactgtcgttggtcgaccggatcttcacccgtatcggctcgagcgacgacctggccggtggacgctcgacgtttatggtcgaaatgagcgaaacggcaaacatcctgcacaatgccactgacaaaagcctggtgctgatggacgaagtcggacgtggcaccagtaccttcgacggcctttcgctggcttgggcagcggcggaatgtctggcgcaactgcgtgcttatacactgttcgcgacgcactatttcgagctgacagtgctgccggaaagcgaaccgctggtgagcaatgtgcacctgaacgccactgagcataacgagcggatcgttttcctgcaccgcgtactgccagggcctgcgagccagagctacggtctggccgtggcgcaactggccggcgtgccgggtaaggtcatcagccgcgccaaggaacacttgcagcgtctggaaaccaccagcctgccgcacgagcagccgcgcgccaaacccggcaagcccgcagtcccgcagcagagcgatatgttcgcaagtctgccgcacccggtgctcgacgagctgtcgaaggtcaaggtcgacgatatgaccccgcggcaggcgctggatttgctatacacattgcaaactcgcctgtga

SEQ ID NO: 4219 - protein, 859 aa, Pseudomonas syringae pv. phaseolicola
MNKAISDLSSHTPMMQQYWKLKNQHLDQLMFYRMGDFYEIFYEDAKKAAKLLDITLTARGQSAGQSIPMCGIPYHAAEGYLAKLVKLGESVVICEQIGDPATSKGPVDRQVVRIITPGTISDEALLDERRDNLIAAVLGDERLFGLAVLDITSGNFSVLEIKGWENLLAELERINPVELLIPDDWPQGLPAEKRRGARRRAPWDFERDSAHKSLCQQFSTQDLKGFGCENLTLAIGAAGCLLSYAKETQRTALPHLRSLRHERLDDTVILDAASRRNLELDTNLSGGRDNTLQSVMDRCQTAMGTRLLTRWLNRPLRDLTILQARQTSITCFLERYRFENLQPQLKEIGDIERILARIGLRNARPRDLARLRDALSALPELQQAMTDLEAPHLQQLAQTASTYPELADLLQRAIIDNPPAVIRDGGVLKTGYDAELDDLQSLSENAGQFLIDLEAREKARTGLANLKVGYNRVHGYFIELPSKQAEQAPADYIRRQTLKGAERFITPELKEFEDKALSAKSRALAREKMLYEALLEDLIGHLAPLQDTAAALAELDVLSNLAERALNLDLNCPRFVAEPCMRIEQGRHPVVEQVLSTPFVANDLALDDSTRMLVITGPNMGGKSTYMRQTALIVLLAHIGSFVPAASCELSLVDRIFTRIGSSDDLAGGRSTFMVEMSETANILHNATDKSLVLMDEVGRGTSTFDGLSLAWAAAECLAQLRAYTLFATHYFELTVLPESEPLVSNVHLNATEHNERIVFLHRVLPGPASQSYGLAVAQLAGVPGKVISRAKEHLQRLETTSLPHEQPRAKPGKPAVPQQSDMFASLPHPVLDELSKVKVDDMTPRQALDLLYTLQTRL

SEQ ID NO: 4220 - DNA, 2643 bp, Pseudomonas putida
  CDS (58)..(2643): transl_table=11
atggtacaatgccccaattttgccccacccttgatcgaaaaactcgccaagcccttgatgaataaagcaatttcggacttcaccgcacacacaccgatgatgcagcagtactggaagctgaaaaaccagcacccagaccagctgatgttctaccgcatgggcgacttctacgaaatcttctacgaagatgcgaaaaaagccgcgaaactgctggatatcaccttgaccgcccgcggtcagtcggccggccagtccattcccatgtgcgggatcccgttccattcgctcgaaggctacctggccaagctggtcaagctgggcgaatcggtggtgatctgtgagcagattggcgacccagccaccagcaagggcccggtggagcgccaggtggtgcgcatcatcacccctggcacggtcagtgacgaggccctgctcgacgagcgccgcgacaacctgattgccgcgctgctcggcgacgagcgcctgttcggcctggccgtactggacatcaccagcggcaacttcagcgtgcaggagatcaagggctgggaaaacctgctggccgagctcgagcggctgaacccggtcgagctgttgatcccggacgactggccgcgcgatttgcctgcggagaaacgccctggcgcccgccgccgcgcaccgtgggacttcgaccgcgactcggcgcgcaaggccctgtgccagcaattcgcgaccaaagacctcaaaggcttcggctgcgacaagctgaccctggccatcggtgccgccggctgcctgctgacctacgccaaggaaacccagcgcaccgccctgccccacctgcgcagcctgcgccacgagcgcctggacgacacggtcatcctcgatggcgccagccgccgcaacctggagctggacatcaacctggccggcgggcgcgacaacacccttcagtcggtgatcgaccgctgccagaccgccatggccagccgcctgctgagccgctggctgaaccgcccgctgcgcgacctcaaggtactgcaggcacgccaggattcgatccgctgcctgctcgacagctatcgcttcgagaagctgcagccgcagttgaaggaaattggcgatatcgagcggatcctcgctcgcatcggcctgcgcaatgcccgcccgcgcgacctggcgcgcctgcgtgatgccttgggcgcattgcccgagctgcagaacgccatgaccgagctcgaggcaccgcaccttgcgcgcctggcagccatcaccggcacctacccggaactggccagcctgctggagcgggcgatcatcgacaacccgccggcggtgatccgcgacggcggcgtgctcaaggccggctatgacaatgagctggacgacctgctggcgatcagcgaaaacgccggccagttcctgatcgacctggaagcccgggaaaaggctcgcacaggccttgccaacctcaaggtcggctacaaccgcgtgcacggctacttcatcgagctaccgaccaagcaggccgagcaggccccaggcgactacattcgccggcagacgctcaagggcgccgagcgcttcatcaccccggagctgaaggcattcgaggacaaggcactgtcggccaagagccgcgccctggcccgcgaaaaaatgctgtacgacgccctgctggaaaccctcatcagccacctggcgccgctgcaggacagcgccgctgccctggccgaactggatgtactcagcaacctggccgaacgtgcactgaaccttgacctgaactgcccgcgcttcgtcgacgagccgtgcctgcgcatcgtgcaaggccgccacccggtggtggagcaggtattgaccacgccgttcgtggccaacgacctgggcctggacaacagcacacgcatgctgatcatcactggcccgaacatgggcggtaagtccacctacatgcgccagaccgccttgatcgtgctgctggcacacattggcagcttcgtgccggcggccagctgcgagctgtcgctggtcgaccgcattttcacccgcatcggttccagcgatgacctggccggcgggcgctcgacgttcatggtcgagatgagcgaaaccgccaacattctgcataacgccaccgaccgcagcctggtgctgatggacgaagtcggccgcggcaccagcaccttcgacggcttgtcgctggcctgggccgccgccgagcgcctggcccagctgcgtgcctacacgctgtttgccacgcactacttcgaactgaccgtgctgccggagagcgagccgctggtggccaacgtgcacctgaacgccaccgagcacaacgaacgcatcgttttcctgcaccacgtgctgcctggccctgccagccagagttacggcctggccgtggcgcaactggccggcgtaccgacagtggtcatccagcgtgcccgcgaacacctggggcgcctggaaaccaccagcctgccgcacgagcagcccccggccgcaaaagccaaggatgcgccgcaggtaccgcaccaaagcgacctgttcgccagcctgccacacccggccatcgagaagctgggcaagctgcagctggacgacatgaccccgcgtcaagctatcgaaatgctatatcaactaaagaacctgttataa

SEQ ID NO: 4221 - protein, 861 aa, Pseudomonas putida
MNKAISDFTAHTPMMQQYWKLKNQHPDQLMFYRMGDFYEIFYEDAKKAAKLLDITLTARGQSAGQSIPMCGIPFHSLEGYLAKLVKLGESVVICEQIGDPATSKGPVERQVVRIITPGTVSDEALLDERRDNLIAALLGDERLFGLAVLDITSGNFSVQEIKGWENLLAELERLNPVELLIPDDWPRDLPAEKRPGARRRAPWDFDRDSARKALCQQFATKDLKGFGCDKLTLAIGAAGCLLTYAKETQRTALPHLRSLRHERLDDTVILDGASRRNLELDINLAGGRDNTLQSVIDRCQTAMASRLLSRWLNRPLRDLKVLQARQDSIRCLLDSYRFEKLQPQLKEIGDIERILARIGLRNARPRDLARLRDALGALPELQNAMTELEAPHLARLAAITGTYPELASLLERAIIDNPPAVIRDGGVLKAGYDNELDDLLAISENAGQFLIDLEAREKARTGLANLKVGYNRVHGYFIELPTKQAEQAPGDYIRRQTLKGAERFITPELKAFEDKALSAKSRALAREKMLYDALLETLISHLAPLQDSAAALAELDVLSNLAERALNLDLNCPRFVDEPCLRIVQGRHPVVEQVLTTPFVANDLGLDNSTRMLIITGPNMGGKSTYMRQTALIVLLAHIGSFVPAASCELSLVDRIFTRIGSSDDLAGGRSTFMVEMSETANILHNATDRSLVLMDEVGRGTSTFDGLSLAWAAAERLAQLRAYTLFATHYFELTVLPESEPLVANVHLNATEHNERIVFLHHVLPGPASQSYGLAVAQLAGVPTVVIQRAREHLGRLETTSLPHEQPPAAKAKDAPQVPHQSDLFASLPHPAIEKLGKLQLDDMTPRQAIEMLYQLKNLL

SEQ ID NO: 4222 - DNA, 3177 bp, Psychrobacter arcticus
  CDS (1)..(3177): transl_table=11
atgtcagtcaaaccctctgctcaaactaatgacaccatacaatcgacttcaaaatctgtgccagcggcgtctgactcattggtcataggcgatgcgatctatcacttggcagatcatacacccatgatggtgcaatatctcaccatgaaagccaactatcctcaagcgctactgctataccggatgggtgatttttatgagctgttttttgatgatgccaagcgcgcggcacagatactagacatcacactaactcgccgtggtacagataaagctggtaacaccattgcgatggcaggcgtaccgtttcatgctgctgacagttatatggcaagattgattgccgctgggcagacagtggttgtctgcgagcaaattgacgaatcagccactggtaatgctaggaatacgtctaatactcctacgatgggcgataaacagaaaaaggataaaagcaaatctgctgctggcactattatgcgccgtgaagtggtcaaaacgctgaccgcagggacgattactgacgatgccttaattgcgcccaatcacacccctactgtcgtcgccattgatatactaatacctaaatctaacagcaaacaatccttgcaagctgccatcagtcagatggatttggctgcgggaacgttaacgacacaaacactaagcgcgaaccatgatgacattgaggggctaaaaacccagatgctcactgtgctagcacgctttgcgccgagtgaatgcattattggtgaagcactcaatgacagtattggtggtatcggcgaagactggctgctgtggctgcgtcaaagccttgactgccctattatcgaagttgctgctaatgacttccatcgtcagcatgccagcgcgactttatgccagcaatttggagtacagcgtcttgatggcttaggatcaggcattagcgatgcgccattggctcaatctagctgtgcagcgctcattcactatgcgcggcagactcagcagcgtcaggtgccacagattaatcagctgattgtcgagtacagcgatgattacttaatcattgatgccaatagtcaacagaatcttgagctatttacacccgttagcagcaatggcacctctttactatctgtactcaatcactgtcaaacgccgatggggcgacgtttattagtacagcaaatgaagcgaccattacgtcaacattcgcgtatcaacctacgcttggatgcgatagcttgtctattaaagacagacaagacctcaatcgagtcgaatcaagcgtcgaatcaagcattgaaacacagctcactggtgataagcttacgcgaaatgcttaatagcatcggtgatatcgagcgcatcagtagccgtatcgggctgatgagcgccaagcctcgcgacttacgtaagcttgctgatggtattgccagtagcacccagcttactaccttactgacggattcaggtgtcagccatgagcaggcaggactgttgccgatgctgatgcagcaactgccagcccagctacctgccgtacagtctatagccaagctgattgagcgcgccattatcacagagcctccggcgcatatccgtgatggcggtatgctagccgcaggttacgatgacgagtttgatcggctgacccatttacatgacaatatccaagtgacactggatgagatggtagagcgagcacgtttagagagtcaattgcccagtctaaaagtcggttttaataaagtcagcggcttttattttgaactaccaaaaatgcaggcaaaaaatgcgccggcacactttatccgtcggcaaacgctcaagagcagcgagcgctttatcactgacgaattaaaagacgtcgagaccgaatatttgagtgcgcagacattagctctgactcgtgaaaagcagctatatcatgagcttttaacggaacttagtagccatttagctgaattacaacagctgagtgctgcaatcgctcaaatagacgtactgagcaattgggcgcagctggctatgacatataactggcagtgtcctgtcatgagtaataatgatgaaaataaagatagctcaaatactgacaatcaagccagtattgatatcagccaaggtcgtcatgtggtggtcgaagccgcgttaaatcccgtcaatgctggtaatgctggtaataccgttaatagctctaataacagctctaataatagcggcaccactagacataacagccattttgtcgccaatgattgtgcgctcggcagcgatgcaaatcctgaaaggctgcttctgattaccggtcctaatatgggcggcaagtcgacctatatgcgtcaaaccgcgctaatcgttcttcttgcccattgtggtagcttcgtcccagcagcgagcgctcatattggtgatatcgaccgcatctttactcgtattggctcagcggatgatttggctggtggcaaatccacttttatggtggagatgattgagacggctaatattctgaatcaggcaaccaatcaatcactggtattaatggatgaagtcggacgtggtactgccaccactgatggactggctatcgcccatgcttgcgtcaatcgattgctagagattggctgcctgacattatttgccacccactattttgagctgacaaaattggcgcaaaaccctaaagaaagtagtggcagcaatgacaagcttatccgcaatgtgcatgtcgctgctagcgaagttgatggtcaactgctattactgcatcaaattaaagaaggtgcagcaagctctagttttggattgcatgtcgctaagatggctggtatccccactcaagtattaaatgatgccaaacgctacttggtagataacttaactatagataacttaggcatagataacttaagcatagacaacctaaaatcgaataatgaaagtgctaatgatgataaaaatgacttagctaagtcggtaaaggacaaacgccagcagactgctgatagcgacatagaaaaactaaatctaagtaatattaaaaaaactcaaaatatgactgatattccacaacaaaatcagttatttagcttacaagacgagctacatgctatcgaccctgacagcctaacgccaaagcaggcgcacgatttaatttatcatctaaagaaaatcattagtcgttaa

SEQ ID NO: 4223 - protein, 1058 aa, Psychrobacter arcticus
MSVKPSAQTNDTIQSTSKSVPAASDSLVIGDAIYHLADHTPMMVQYLTMKANYPQALLLYRMGDFYELFFDDAKRAAQILDITLTRRGTDKAGNTIAMAGVPFHAADSYMARLIAAGQTVVVCEQIDESATGNARNTSNTPTMGDKQKKDKSKSAAGTIMRREVVKTLTAGTITDDALIAPNHTPTVVAIDILIPKSNSKQSLQAAISQMDLAAGTLTTQTLSANHDDIEGLKTQMLTVLARFAPSECIIGEALNDSIGGIGEDWLLWLRQSLDCPIIEVAANDFHRQHASATLCQQFGVQRLDGLGSGISDAPLAQSSCAALIHYARQTQQRQVPQINQLIVEYSDDYLIIDANSQQNLELFTPVSSNGTSLLSVLNHCQTPMGRRLLVQQMKRPLRQHSRINLRLDAIACLLKTDKTSIESNQASNQALKHSSLVISLREMLNSIGDIERISSRIGLMSAKPRDLRKLADGIASSTQLTTLLTDSGVSHEQAGLLPMLMQQLPAQLPAVQSIAKLIERAIITEPPAHIRDGGMLAAGYDDEFDRLTHLHDNIQVTLDEMVERARLESQLPSLKVGFNKVSGFYFELPKMQAKNAPAHFIRRQTLKSSERFITDELKDVETEYLSAQTLALTREKQLYHELLTELSSHLAELQQLSAAIAQIDVLSNWAQLAMTYNWQCPVMSNNDENKDSSNTDNQASIDISQGRHVVVEAALNPVNAGNAGNTVNSSNNSSNNSGTTRHNSHFVANDCALGSDANPERLLLITGPNMGGKSTYMRQTALIVLLAHCGSFVPAASAHIGDIDRIFTRIGSADDLAGGKSTFMVEMIETANILNQATNQSLVLMDEVGRGTATTDGLAIAHACVNRLLEIGCLTLFATHYFELTKLAQNPKESSGSNDKLIRNVHVAASEVDGQLLLLHQIKEGAASSSFGLHVAKMAGIPTQVLNDAKRYLVDNLTIDNLGIDNLSIDNLKSNNESANDDKNDLAKSVKDKRQQTADSDIEKLNLSNIKKTQNMTDIPQQNQLFSLQDELHAIDPDSLTPKQAHDLIYHLKKIISR

SEQ ID NO: 4224 - DNA, 2769 bp, Ralstonia eutropha; identical to SEQ ID NO: 4048
  CDS (85)..(2769): transl_table=11

SEQ ID NO: 4225 - protein, 894 aa, Ralstonia eutropha
MQEKIELNQEVAKPLAEKHTPMMQQYLRIKADHPDTLLFYRMGDFYELFHDDAEKAARLLDITLTARGSSNGVPIRMAGIPFHSADQYLAKLVKLGESVAICEQIGDPAASKGPVERKVVRIVTPGTLTDASLLPDKSDTFLMAVHQQTTRRGVSKTGLAWLNLASGELRLMECEAAQLAREFERIRPAELLYADGIDLPAVACARTRLPEWHFDQDAGTRRLLEQLGVASLEPFGCAGLGAAIGAAGALLNYAATTQGQSLRHVRDIKVERESEFVGLDSATRRNLELTETLRGGESPTLFSLLDTCATAMGSRALRHWLHHPLRDPALPRARQQAIGVLIDHGIDDLRSALRKLADVERITSRLALLSARPRDLSSLRDTLRALPHVRACLQAEPDSSLLSLTVAELAVPQACLDLLISAVAEEPATVVRDGGVIARGYDAELDELRDISENCGQFLVDLESRERTRTGIANLRVEYNRVHGFYIEVTNGQADKVPDDYRRRQTLKNAERYITPELKAFEDKALSAQDRALAREKQLYDVLLQALLPHIGELQRVAGALARLDVLASLAERAQTLDWSCPERVGDNVIDIVQGRHPVVEGQLAAESVPFIANDCQLNEARKLLLITGPNMGGKSTFMRQTALIVLLACVGAYVPARRAVIGPVDRIFTRIGAADDLAGGRSTFMVEMTEAAAILHHATPASLVLMDEIGRGTSTFDGLALAWAIARHLLSHNRSHTLFATHYFELTQLPQEFPQAANVHLSAVEHGDGIVFLHAVQDGPASQSYGLQVAQLAGVPQPVIRAARKHLAWLEQQSADATPTPQLDLFAPPPHPDTSDDDEPVSIGKPVQVALLPEQAAVLDALSDLDPDSLTPRAALDALYRLKVLAGEVVDAA

SEQ ID NO: 4226 - DNA, 2727 bp, Rhizobium leguminosarum bv. viciae
  CDS (1)..(2727): transl_table=11
gtgaacgcacgaatagatacagggaatgaagccttttcggctgccgagcttgccacggcggaaagccgtgcctcggcgacgccgatgatggagcaatatatcgagatcaaggcgaacaatccggattcgcttctgttctatcgcatgggcgatttctacgagctgttcttcgaggatgcgctggaagcctcacgcgcgctcgggatcacgctgaccaagcgcggccagcacatgggccaggatatcccgatgtgcggcgttccggtgcatgcggccgatgattatctacagaagctgatttcgctcggcttccgcgtcgccgtctgcgagcagatcgaggatcccgcggaagcgaagaaacgcggcgcgaaatccgtcgtcaggcgcgacgtcgtccgcctcgtcactcccggcacgatcaccgaggaaaagctgctttcgccctcggaatccaactatctgatggcgctgacccgcattcgcggcagcggcgaggccttgctggcgcttgcctggatcgatatttccaccggcgtcttccggcttgccgagaccgaagcctcgcgcctgcttgccgatatcctgcgcatcgatccgcgcgaactcatcctgcccgacaccatcttccacgatcccgaactcaagccggtcttcgacgtgctcggccgcacagccgtgccgcagccttccgtgctcttcgacagcgccagcgccgaaggccggatcgcgcggtatttcggcgtcgcgacgctcgacggcttcggcaccttttcgcgcgccgagctggcggccgcggctgccgccgtcgcctatgtcgagaagacgcagatcgccgagcggccgccgcttggaaagccggagcgggaaagtgcggcttcgacgctgttcatcgatcctgccacccgcgccaatctcgaacttgcccgcacgctgtctggcgatcgcaacggttcgctgctgaaggcgatcgaccgcaccgtcaccggcggcggtgccaggcttctcgccgaacggctgatgtcgccgttgaccgaccccgcccgcatcaatgcgcggctcgattcgatcggcttcctgatcgacgagcccttgctctgcggcaatctgcgcgacacgttgaaacatgtgcccgacatgccgcgtgcgctgtcgcggctggcgctcgaccgcggcggcccgcgcgatctctcagcgattcgccagggccttgacgcggcgggcggagttgcggtgatgctcggcaaggcggtgctgcccgaagagctcggccaggcgctgtccgagctgcaggcccttcccgcgaccctggaaaagctgcttgccgaaacgcttgccgaagaattgccgctgttgaaacgcgatggcggcttcctgcgcgacggcgccaacgccgagctcgacgaggtccgggcactgcgcgaccagtcgcgtcgcgtcatcgctggcttgcaattgcaatatgccgaggaaaccggcatccggtcgctgaagatcaagcacaacaacgtcctcggctatttcatcgaagtcaccgccggcaatgcctcgccgatgacggagacggcggacgcgaaggcccgcttcatccaccgccagacgatggcgaacgcgatgcgcttcaccacgaccgaacttgccgatctcgaaagccgcatcgccaatgcggccgaccaggcgcttacgatcgaactcgaagccttcgacaggatgacggcggccgtcgttgcggaagccgaggcgatcaagtcgggcgcccgggcgctcgcggtcatcgacgtcgccgcaggcctggcgcttctcgcggaggagcaggcctattgccgcccgcaggtcgacggctcgaagatgtttgccatcgagagcgggcgccatccggtcgtcgagcaggcgctgcggcggcaggcgggcggccccttcgtcgccaatcattgcgatctgtcgccgaagaccggcgaccgggacggggcgatctggctactgaccggcccgaacatgggcggtaagtcgaccttcctgcgccagaacgcgctgatatcaatcctggcgcagatgggctccttcgtgccggcgacatcggcccatatcggcatcgtcgaccggcttttctcgcgcgtcggcgcctccgacgatctggcgcgcgggcgctcgaccttcatggtcgagatggtggaaacggcggcgatcctcaaccaggcaagcgaccgttcgctcgtcatcctcgacgagatcggccgcggcaccgcgacgttcgacggcctgtcgatcgcctgggccgccgtcgagcacctgcatgaggccaatcgctgccgcggcctcttcgccacgcatttccacgagttgaccgtgctttcggaaaagcttggccggctgtcgaacgcgacgatgcgcgtcaaggaatgggacggcgacgtcattttcctgcacgaggtcgggccgggtgcggctgaccgctcctatggcatccaggtcgcgcgccttgccgggcttccggcctcggtcgtggcacgcgcccgcgacgtactcacccgtctggaagatgccgaccgcaagaacccggcgagccagctgatcgacgacctgccgctcttccaggtggcggtgcgccgcgaggaaacggcccgcggggcctccaaggtcgaggaggcgctgaaggcgatgagccttgacgacatgacgccgcgcgaggcaatggatgcgctttacgacctcaagaaaaagctgaaatag

SEQ ID NO: 4227 - protein, 908 aa, Rhizobium leguminosarum bv. viciae
MNARIDTGNEAFSAAELATAESRASATPMMEQYIEIKANNPDSLLFYRMGDFYELFFEDALEASRALGITLTKRGQHMGQDIPMCGVPVHAADDYLQKLISLGFRVAVCEQIEDPAEAKKRGAKSVVRRDVVRLVTPGTITEEKLLSPSESNYLMALTRIRGSGEALLALAWIDISTGVFRLAETEASRLLADILRIDPRELILPDTIFHDPELKPVFDVLGRTAVPQPSVLFDSASAEGRIARYFGVATLDGFGTFSRAELAAAAAAVAYVEKTQIAERPPLGKPERESAASTLFIDPATRANLELARTLSGDRNGSLLKAIDRTVTGGGARLLAERLMSPLTDPARINARLDSIGFLIDEPLLCGNLRDTLKHVPDMPRALSRLALDRGGPRDLSAIRQGLDAAGGVAVMLGKAVLPEELGQALSELQALPATLEKLLAETLAEELPLLKRDGGFLRDGANAELDEVRALRDQSRRVIAGLQLQYAEETGIRSLKIKHNNVLGYFIEVTAGNASPMTETADAKARFIHRQTMANAMRFTTTELADLESRIANAADQALTIELEAFDRMTAAVVAEAEAIKSGARALAVIDVAAGLALLAEEQAYCRPQVDGSKMFAIESGRHPVVEQALRRQAGGPFVANHCDLSPKTGDRDGAIWLLTGPNMGGKSTFLRQNALISILAQMGSFVPATSAHIGIVDRLFSRVGASDDLARGRSTFMVEMVETAAILNQASDRSLVILDEIGRGTATFDGLSIAWAAVEHLHEANRCRGLFATHFHELTVLSEKLGRLSNATMRVKEWDGDVIFLHEVGPGAADRSYGIQVARLAGLPASVVARARDVLTRLEDADRKNPASQLIDDLPLFQVAVRREETARGASKVEEALKAMSLDDMTPREAMDALYDLKKKLK

SEQ ID NO: 4228 - DNA, 2730 bp, Rhizobium loti
  CDS (1)..(2730): transl_table=11
atgaacatgcacagcccgaacgagcccgacgcccccgaggtgatgacgacgccgcagcccggcacggccgccgtcacgccgatgatggagcagttcatcgagatcaaggcggcgaacccggattcgctcttgttctaccgcatgggcgatttctacgagctgttcttcgacgacgccgaaaaggcgagccgggcgctgggcatcgtcctgaccaagcgcggcaagcaccagggccacgatatcccgatgtgcggcgtgccggtgcatgcggccgacgattatctgcagaagctgatcggccagggattccgcgtcgccgtctgcgagcagatcgaggatccggccgaagccaagaagcgcggctccaaatcggtggtgcgccgcgacgtggtgcggctggtgacgccgggcaccatcaccgaggacaaattgctggcgccgtcggaatcgagcttcctgatggcgctggggcgggtgaagggcggcagcgaccactcctttgcgattgcctggatcgacatctcgaccggcgccttccgcgtcgccgagaccaccgccgaccggctgctcgccgacatcttccgcgtcgatccgcgcgagctcatcgtcgccgagccggtgttccatgatcctgagctgaggccggtgttcgacgtgctcggccgcgtcgccaacccgcagccgccatcgctgttcgattcggcctcggccacgggccgcatcgcccgcttcttcgacgtggcgacgccggacagctttggtacgttttcgcgcgccgaactgtcggcgatctcgggcgccatcgcctatgtagagaagacgcagaaggccgagcgtccgccgctgtcgcggccggagcgcgaggagcagggttcgaccctgttcatcgatccggcgacgcgcggcaatctcgaactcttgcgcacgctctcgggaagccgcgagggctcgctgttcaaggcgatcgaccgcacggtgaccggcggcggcgcaaggctgctcgccgaccggctgatggcgccgctgaccgacccggcggcgatcggcgcgcgcctggattcggtgtcgttcttccgcaccgaaacccggctttgccaggcggtgcgggcgagcctgaagagcgtcgccgacatgccgcgcgcgctgtcgcggctggcgctcaaccgcggcggcccacgcgacctcggcgcgctgcgcgccggcttcgaggcggccggcgccatcgtcgaaatcttcgccgcaaccgccctgccccaggagttggcggaggcgatggccgccatccgggcgctgccgcaggcgcttgcccagcacctgattcaggcgctgggcgaggaattgccgcttttgaagcgcgacggtggtttcctgcgcggcggctatcacccggaactcgacgagatgcgggcgctgcgcgacgaatcgcggaaggtaatcgccgggctggagcgctcgctgatcgaggagaccggcatccgttccctgaagatccggcacaacaatgtgctgggttactacatcgaggtgaccgccaaccatcatgcgatcatgaccggcagcgatggcgccaaggcgcgctttatccaccgccagaccatggccaatgccatgcgtttcaccacgaccgagcttgccgaactcgagaccaagatcgccaacgccgccgaccgcgcgctcggcatcgaactggcggccttcgaggcgctgacggcgcaagcggtcggcgaggcggaaaagatccgtgccggcgccgatgcgctggcagcaatcgatgtctcggcggcacttgcgctgctttcggaaagcgaagcctggtgccggccggtggtggattcgagccttgccttcgaaatctccggcggccggcatccggtggtcgagcaggccttgcgccgttcgggcgagggaccgttcgtcgccaatgattgcgacctgtcgccggaggggaacgccaagaacggcgcgatctggctgctgaccggcccgaacatgggcggtaaatcgacgtttctcaggcaaaacgcgctgatcgccatcctggcccagaccggctcctttgtgccggcaacatcggcccatatcggcgtcgtcgaccggctgttctcgcgcgtcggggcttcggacgatctggcgcgcggccgttcgaccttcatggtcgagatggtcgagacggcggcgatcctcaaccaggccggcgaacgggcgctggtgatcctcgacgagatcggccgcggcaccgccaccttcgacggcctgtcgatcgcctgggcggcggtcgaatacctgcatgagaagaaccgctgccgggcgatcttcgccacccatttccacgaaatgacctcgctcgccggcaagctggcgcggctccacaacgtcaccatgcgggtcaaggaatgggaaggcgacgtcgtcttcctgcacgaggtcggcaagggtgccgccgaccgctcctatggcgtgcaggtggcgcggctcgccggcctgccggaagcggtggtcgaccgggccaagcaggtgctgcaccagctggaggaaggcgaggtttccggcaagaccaaccggctggtcgacgacctgccgctgttttccgtggccatgaagcgggaggcgccgaagccggtgaagagcgacgcgctcggcgccgccctcggcgacatcaatcccgacgagatgacgccacgggaagcgctggaggcgctctaccggctgaagggactggcggggaagtag

SEQ ID NO: 4229 - protein, 909 aa, Rhizobium loti
MNMHSPNEPDAPEVMTTPQPGTAAVTPMMEQFIEIKAANPDSLLFYRMGDFYELFFDDAEKASRALGIVLTKRGKHQGHDIPMCGVPVHAADDYLQKLIGQGFRVAVCEQIEDPAEAKKRGSKSVVRRDVVRLVTPGTITEDKLLAPSESSFLMALGRVKGGSDHSFAIAWIDISTGAFRVAETTADRLLADIFRVDPRELIVAEPVFHDPELRPVFDVLGRVANPQPPSLFDSASATGRIARFFDVATPDSFGTFSRAELSAISGAIAYVEKTQKAERPPLSRPEREEQGSTLFIDPATRGNLELLRTLSGSREGSLFKAIDRTVTGGGARLLADRLMAPLTDPAAIGARLDSVSFFRTETRLCQAVRASLKSVADMPRALSRLALNRGGPRDLGALRAGFEAAGAIVEIFAATALPQELAEAMAAIRALPQALAQHLIQALGEELPLLKRDGGFLRGGYHPELDEMRALRDESRKVIAGLERSLIEETGIRSLKIRHNNVLGYYIEVTANHHAIMTGSDGAKARFIHRQTMANAMRFTTTELAELETKIANAADRALGIELAAFEALTAQAVGEAEKIRAGADALAAIDVSAALALLSESEAWCRPVVDSSLAFEISGGRHPVVEQALRRSGEGPFVANDCDLSPEGNAKNGAIWLLTGPNMGGKSTFLRQNALIAILAQTGSFVPATSAHIGVVDRLFSRVGASDDLARGRSTFMVEMVETAAILNQAGERALVILDEIGRGTATFDGLSIAWAAVEYLHEKNRCRAIFATHFHEMTSLAGKLARLHNVTMRVKEWEGDVVFLHEVGKGAADRSYGVQVARLAGLPEAVVDRAKQVLHQLEEGEVSGKTNRLVDDLPLFSVAMKREAPKPVKSDALGAALGDINPDEMTPREALEALYRLKGLAGK

SEQ ID NO: 4230 - DNA, 2751 bp, Rhizobium meliloti
  CDS (1)..(2751): transl_table=11
atgaatttcctgatggatgcatcgaaccgctcgggcgacgtcctttccgtgtccgatctcgcaagcgaggagagccgctccactgccacgccgatgatggagcagttcatcgagatcaaggcgaacaatccggattcgctcctgttctaccgcatgggcgatttctacgagctgttcttccaggatgcggtcgaggcctcgcgcgcgctcggtatcacgctgacgaaacgcggccagcacatgggacaggagattccgatgtgcggcgtgccggtgcatgcggccgacgattacctgcagaagctgatcgcatccggctaccgtgtcgccgtctgcgaacaggtggaggacccggccgaagcgaagaagcgcggcagcaaatcggtcgtgcgccgcgatgtcgtgcgcctggtgacgccggggacgatcaccgaggacaagctgctctcgccttcggaatcgaactatctgatggcgctggcgcgcatcaggagcggctcggagccggcctatgctcttgcctggatcgacatttcgacgggcatcttccgcctcgccgagacggcggagagccgcctgcttgccgacatattgcggatcgaaccgcgcgagctgatcctgcccgacaccgtctttcacgatccggatctcaggcccgtcttcgacgtgctcgggcgcgtcgcggtgccgcagccggccgtcctcttcgacagcgcgacggcggagggccgcatttcacgctactacggcgtgggcacgctcgatgggttcggcagcttctcgcgcgcggagctcgcggccgcttcggcggcggtctcctatgtcgagaagacccagctccaggagcgcccggcgctcggcattccggaaagggaaagcgccgcctcgacactcttcatcgatccggcgacccgcgccaatctggaactcgccaagacgctttccggctcccgcgacggcagcctgctcaagtcgctcgatcgcacgatgacgagcgggggcgccaggctgctcgccgaaaggctgatgtcgcccctgaccgacccggagcggatcaaccagcggctcgattcgatcgaggtgctggccgatcagccgcgctttacgacggatgttcgcgacgcgcttcgcagggcgccggacatgccgcgggccctgtcgcggctcgcgctcggccgcggcggccctcgcgatctcggtgccatccaggcgggcatgcgggccgcggcggcgatatcggcgctcctctcgggcgccgagctctcggcggaactgaccgaagcgcgcgacgcgatcgcggccttgccgggggaattgctcgcgcgcctcgacgcgacccttgccgaggaactgccgcttctgaagcgcgacggcggcttcgtccgcgagggcgcgagcgccgagctcgacgagatgcgggcgctgcgcgatcagtcgcgccgcgtgatcgcggggctgcagctgcaatattgcgaagagacgggcatcaagtcgctgaagatcaagcacaacaacgtgctcggctacttcatcgaggtgaccgccggcaatgccggatcgatgaccgacaccgacgccggccgcgcccgcttcattcatcgccagaccatggcgaatgccatgcgcttcaccacgaccgagcttgccgagctcgaaacgaagatcgccaatgccgcggaccgggcgctggcgatcgagctcgagaccttcgaggccatggtgcgcgaggtggtcgccgaggccgaggcgatcaaggcggcagcgctggcgctcgcgacgatcgacgtctcggccgggctcgcagtgcttgcggaggagcagaattatacgcgccctacggtcgaccgctcgcgaatgttcgcgatcgacggaggacgccaccccgtcgtggagcaggccctgcggcgccaggctgccaatcccttcgtcgccaacggctgcgatctttctccgccgaacggcgagcagggcggcgcgatctggctcctcaccgggcccaacatgggcggcaagtcgaccttcctgcgccagaacgcgctgatcgcgatcatggcccagacgggatccttcgtgcccgcggccgccgcgcatatcggcgtggtcgaccggctcttctcgcgcgtcggcgcttcggacgatctcgcccgcgggcggtcgaccttcatggtcgagatggtcgagacggcggcgatcctcaatcaggcgacggaccgctcgctggtgatcctcgacgagatcggccgcggcaccgcgaccttcgacggcctgtcgatcgcctgggcggcggtcgagcatctgcacgaggtcaatcgctgccgcgggctcttcgcgacccatttccacgagctgacggttctctccgaaaagctcgtgcggctgtcgaacgcgaccatgcgcgtcaaggagtgggacggcgacgtcatcttcctgcacgaggtaggcccgggcgccgccgaccgttcctacggcatccaggtcgcccgccttgcgggcttgccggcgtcggtcgtcgcccgcgcgagggatgtgcttgccaagctcgaggatgccgaccgcaagaatccggcgagccagctgatcgacgacctgccgctgttccaggttgccgtccggcgagaggaggcggcgagggcatcgtcgggtccttcgaaggtcgaggaggccctgaaggcgctcaacccggacgacatgacgccgcgagaggcgctcgacgcgctttacgcgctcaagaaggagctttccaaccgctga

SEQ ID NO: 4231 - protein, 916 aa, Rhizobium meliloti
MNFLMDASNRSGDVLSVSDLASEESRSTATPMMEQFIEIKANNPDSLLFYRMGDFYELFFQDAVEASRALGITLTKRGQHMGQEIPMCGVPVHAADDYLQKLIASGYRVAVCEQVEDPAEAKKRGSKSVVRRDVVRLVTPGTITEDKLLSPSESNYLMALARIRSGSEPAYALAWIDISTGIFRLAETAESRLLADILRIEPRELILPDTVFHDPDLRPVFDVLGRVAVPQPAVLFDSATAEGRISRYYGVGTLDGFGSFSRAELAAASAAVSYVEKTQLQERPALGIPERESAASTLFIDPATRANLELAKTLSGSRDGSLLKSLDRTMTSGGARLLAERLMSPLTDPERINQRLDSIEVLADQPRFTTDVRDALRRAPDMPRALSRLALGRGGPRDLGAIQAGMRAAAAISALLSGAELSAELTEARDAIAALPGELLARLDATLAEELPLLKRDGGFVREGASAELDEMRALRDQSRRVIAGLQLQYCEETGIKSLKIKHNNVLGYFIEVTAGNAGSMTDTDAGRARFIHRQTMANAMRFTTTELAELETKIANAADRALAIELETFEAMVREVVAEAEAIKAAALALATIDVSAGLAVLAEEQNYTRPTVDRSRMFAIDGGRHPVVEQALRRQAANPFVANGCDLSPPNGEQGGAIWLLTGPNMGGKSTFLRQNALIAIMAQTGSFVPAAAAHIGVVDRLFSRVGASDDLARGRSTFMVEMVETAAILNQATDRSLVILDEIGRGTATFDGLSIAWAAVEHLHEVNRCRGLFATHFHELTVLSEKLVRLSNATMRVKEWDGDVIFLHEVGPGAADRSYGIQVARLAGLPASVVARARDVLAKLEDADRKNPASQLIDDLPLFQVAVRREEAARASSGPSKVEEALKALNPDDMTPREALDALYALKKELSNR

SEQ ID NO: 4232 - DNA, 2676 bp, Rhodopirellula baltica
  CDS (1)..(2676): transl_table=11
atgactcccatgatgcgacagtaccacgaggcgaaagaggcgtgcggtgacgcattgctcttctttcgcatgggcgatttctacgaactgtttttggacgacgccaaggtcgctgcggggatcttggggctgaccctcaccagccgcgacaaagacagcgaaaaccccacggcgatggcgggttttccccaccaccaattggatcagtacctgcaaaaactgatccgtgcgggctttcgagctgcggtttgcgagcaggtcgaagatcccaaagcagcaaaaggcttggtccgccgcgaaatcactcgggtggtcagtgccggcacgttgaccgacgagggattgctcgacccaaaagaaccgaactacttggcggccgttttcgcacccagccagaaagctcgcgaaaaagctcagaaagaagcggcgaagacaaacgaccctagcggtggcgacgtcgtcggaatcgcttgggcggaactctccagcggtcgtttcgaggccggcgtttttccgcgagcccgtttggatgatgaacttgctcgcatcggtcccgcggaagtgcttcattgcgaagacgatgcttccgttcatcccgacccaaccgcaacctggtcctggaccgctcgtcccgcttggagctacgcagccgccgacgccgaaaaatcgctctgcaaacagctttcagtcgccaacttggaaggcctcggcttcgaagacaacggcgatgttgcgatccgagccgctggtgcggtgctgtgctacctcaaagaaacccagcgtggctcactggatcactttcgttcgttgacctgccacaaccgcagcccggttttgcagatcgacgccgcgacgcgtcgcagtctcgaaatcactcgaacgatgcgaacgggatcccgcgaaggtgccttgctcggcgtgatcgatcgcaccgtgacgccaatgggttcgcgaatgctcgccgatcacttggccgctccgctcatcgatgcggacgcaatcacctatcgaaccgacgcggtggatgagttcgttcgaaacaacaatctacgaagcgacatccgcacggtcctcggtgacacatacgacctgactcggttgctcgcccgagtcgccaccggacgcaccggaccgcgtgacttgcgacagatcgccgtgactctcagtggccttcccgcactcaaagcccgcttggccgaacgagatagcgcgtgtctaacccgtctggaatcggaactgcatctctgtcccgaacttcgcgaacaactcgaatccgcactcaacgacgaatgcccgctgtcggccgccgacggcaacttcattcgcgaaggatttgactccgaactcgatacgctccgcgaattggctcgcggcggcaaacgctggatcgctgaatatcaacagcggcaaatggacgaaaccggcatcgccaatttgaaagtcggttacaaccgcgtctttggttactacctggaagttagcaacgcacacaaagacaagattcctgcggatttcattcgcaagcaaacactaaaaaattgcgaacggtacatcacgccggagctaaaagaatacgaagagaaggttctcgccgcggatgaaaaagcgtccagccgtgagcaaatgcttttcacgctgctccgcgaaaacacgcacaagcatttggcaattctgcaagaagtcgccaatgccatcgcgatgaccgatgtggtcgcgtcgctggccgaagttgccgcgcaacatcattgggtccgtccgacactgaccgatgacagcgtgcttcgcatcgaaggtggccgacacccggtgttggacgtcacgatggcacagggcgagttcgttcccaacgactgtattcaaagccccgaaacaggaatgatcttgctgatcaccggccccaacatggccggcaagagcacgtacattcgccaagtcgctttgatcaccttgctggcacaaaccggcagcttcgtccccgcaacgtccgccgaaattggaatcgctgatcgtatctttgctcgggttggcgcgagcgatgaactcagtcgcggccaaagcacgttcatggtcgagatggttgagaccgctcggattctgaacacagcaacctcacgcagcttggtcatccttgacgaaatcggtcgcggaaccagcacgtacgacggcttgtcgttggcctgggcaatcaccgagcacttacacgaacagatcggggcgagaacgcttttcgcaacgcactatcacgaactcgcggccctccaagaaacgcttccacgcgtcgccaacctcagcgtcgcggtgaaggaatggcaagacgaagtggtgtttttgcaccgcatcgtgccggggagtgctgacaagagttatggcattcaagtcgctcggttggccggaattccggtcgaagtcaacgagcgtgccaaggatgttctggcacaactcgaagcggatcaccgcgacagtctcgaccgccccacgattgcgccaccaagcggagtcaacggaaagggctccggcgatacctatcaactgaccttgtttggctacgccgatcacccgctgatccaagagatcgaaacagttgacattgactcgatgtcaccgattcaagcttggcagttcctgcaggaagcaaaagcgaaactctccgcaggtccaaaagcggtgaaggggtaa

SEQ ID NO: 4233 - protein, 891 aa, Rhodopirellula baltica
MTPMMRQYHEAKEACGDALLFFRMGDFYELFLDDAKVAAGILGLTLTSRDKDSENPTAMAGFPHHQLDQYLQKLIRAGFRAAVCEQVEDPKAAKGLVRREITRVVSAGTLTDEGLLDPKEPNYLAAVFAPSQKAREKAQKEAAKTNDPSGGDVVGIAWAELSSGRFEAGVFPRARLDDELARIGPAEVLHCEDDASVHPDPTATWSWTARPAWSYAAADAEKSLCKQLSVANLEGLGFEDNGDVAIRAAGAVLCYLKETQRGSLDHFRSLTCHNRSPVLQIDAATRRSLEITRTMRTGSREGALLGVIDRTVTPMGSRMLADHLAAPLIDADAITYRTDAVDEFVRNNNLRSDIRTVLGDTYDLTRLLARVATGRTGPRDLRQIAVTLSGLPALKARLAERDSACLTRLESELHLCPELREQLESALNDECPLSAADGNFIREGFDSELDTLRELARGGKRWIAEYQQRQMDETGIANLKVGYNRVFGYYLEVSNAHKDKIPADFIRKQTLKNCERYITPELKEYEEKVLAADEKASSREQMLFTLLRENTHKHLAILQEVANAIAMTDVVASLAEVAAQHHWVRPTLTDDSVLRIEGGRHPVLDVTMAQGEFVPNDCIQSPETGMILLITGPNMAGKSTYIRQVALITLLAQTGSFVPATSAEIGIADRIFARVGASDELSRGQSTFMVEMVETARILNTATSRSLVILDEIGRGTSTYDGLSLAWAITEHLHEQIGARTLFATHYHELAALQETLPRVANLSVAVKEWQDEVVFLHRIVPGSADKSYGIQVARLAGIPVEVNERAKDVLAQLEADHRDSLDRPTIAPPSGVNGKGSGDTYQLTLFGYADHPLIQEIETVDIDSMSPIQAWQFLQEAKAKLSAGPKAVKG

SEQ ID NO: 4234 - DNA, 2724 bp, Rhodopseudomonas palustris
  CDS (1)..(2724): transl_table=11
atgacaatccgccccgacatcgctctgccgcccgacgccgctccgcctccggaggcgcccgccaaaatgtcgccgatgatggagcagtaccacgagatcaaggccgccaatcctggcctgttgctgttctaccggatgggcgatttctacgagctgttcttcgaggatgccgaaatcgcgtcacgcgcgctcggcatcaccctgaccaagcgcggcaagcatctcggcgccgacattccgatgtgcggtgtgccggtcgagcgctccgacgactacctgcaccggctgatcgcgctgggtcaccgcgtcgctgtgtgcgagcagaccgaagacccggccgcggcgcgcgcccgcaagagcgtggtgcggcgcgacgtggtgcggctgattacgccgggcacgctgaccgaagataccctgctcgacgcccgcgccaacaactacctgctggcgatcgcgcgcgcccgcggctcggccggcgccgatcgcatcgggctcgcctggatcgacatctcgaccggcgaattctgcgtcaccgaatgttcgaccgccgagctcgccgcgacgctggcgcggatcaatccgaacgaagccatcgtgccggacgcgctgtacagcgacacagaactcgccccgaccttgcgcgagctcgccgccgtcacgccgctgacgcgtgacgtgttcgattccgccaccgccgagcggcggctgtgcgattacttcgctgtcgccaccatggacggcctcgccgcgctgtcacggctggaagcgaccgccgccgcggcctgcgtcacctatgtcgaccgtacccagctcggcaaacggccaccattgtcgccgccggcacgcgaggcgaccggctcgacgatggcgatcgacccggcgacccgcgccaatctcgaactcacccgtacactcgccggcgagcgccgcggttcgctgctcgacgcgatcgactgcacggtgacggccgccggctcgcggctgctcgcgcagcggctcgccgcgccgctcaccgatgcggccacgatcgcccggcggctggatgcggtcgaagccttcgcggtggattccggacttcgcgaacagatccgcagctcgctgcgggcggcgcccgacatggcgcgcgcactggcgcggctgtcgctcggccgtggcggtccgcgagatctggcgaacttgcgcgacggcatccgcgccgccgacgaggtgctggtgcagcttgcacagctcgcaagcccgccgcaggagatcgcaagcgcgatggcggcgctgcagcggccgtcgcgcgagctgtgcgccgagctcggccgcgcactggccgatgatctgccgcttctcaagcgcgacggcggcttcgtgcgcgaaggctacgagccggcgctcgacgagacccgcaagctgcgcgacgcctcgcggctggtggtggcgtcgatgcaggcgcgctacgccgacgacaccgggatcaaggcgctgaagatccggcacaacaacgtgctcggttacttcgtcgaggtctcggcgcagcacggcgagaagttgatggcgccgccactgaacgccactttcatccatcgccagacgctggccgggcaggtgcgcttcaccaccgccgaactcggcgagatcgaggccaagatcgccaatgcgggcgatcgcgcgctcgggctggagctggagatcttcgatcggctggccggctcgatcgatgccgccggcgacgatctgcgcgccgctgcgcatgccttcgcgctgctcgatgtcgccactgcgctcgccaagctcgcgtccgacgacaactacgtccggcccgaggttgacgagtcgctggcgttcgcgatcgaaggcggccggcacccggtggtcgagcaggcgctgaagcgtgccggcgagccgttcatcgccaacgcctgcgatctgtcgcccggcccggcgcagaagaacggccagatctggctgctgaccggcccgaacatggccggtaagtcgaccttcctgcgccagaacgcgctgatcgccctgctcgcccaggtcggcagcttcgtgccggcgatccgggcacggatcggcatcgtcgaccggctgttctcgcgcgtcggcgccgccgacgacctcgcccgcggccgttcgaccttcatggtcgagatggtcgagaccgccgcgatcctgaaccaggcctccgaacgggcgctggtgatcctcgacgagatcggccgcggcaccgcgacgttcgacggcctctcgatcgcctgggcggcgatcgagcacctgcacgaacagaacaggtgtcgttcgctgttcgccacgcactaccatgagctgaccgccctgtcggccaagctgccccggctgttcaacgccaccgtgcgggtcaaggaatggcgcggtgaggtggtatttctgcacgaggtgctgccgggctccgccgaccgctcctacggcatccaggtcgccaagctggcggggctcccccccagcgtggtgagccgcgcgaaggccgtgctggccaagctcgaagccaacgaccgcggccagccgaagacgctgatcgacgacctgccgctgttcgccatcacggctcgcgcacccgccgaagccgccccaccgagcgaggccgagcagctgatcgacgcggtcaaggcgctgcatcccgacgagatgaccccgcgcgaggcgctggatgcgttgtacgccctgaaggcgaagctaccgaaggccgactga

SEQ ID NO: 4235 - protein, 907 aa, Rhodopseudomonas palustris
MTIRPDIALPPDAAPPPEAPAKMSPMMEQYHEIKAANPGLLLFYRMGDFYELFFEDAEIASRALGITLTKRGKHLGADIPMCGVPVERSDDYLHRLIALGHRVAVCEQTEDPAAARARKSVVRRDVVRLITPGTLTEDTLLDARANNYLLAIARARGSAGADRIGLAWIDISTGEFCVTECSTAELAATLARINPNEAIVPDALYSDTELAPTLRELAAVTPLTRDVFDSATAERRLCDYFAVATMDGLAALSRLEATAAAACVTYVDRTQLGKRPPLSPPAREATGSTMAIDPATRANLELTRTLAGERRGSLLDAIDCTVTAAGSRLLAQRLAAPLTDAATIARRLDAVEAFAVDSGLREQIRSSLRAAPDMARALARLSLGRGGPRDLANLRDGIRAADEVLVQLAQLASPPQEIASAMAALQRPSRELCAELGRALADDLPLLKRDGGFVREGYEPALDETRKLRDASRLVVASMQARYADDTGIKALKIRHNNVLGYFVEVSAQHGEKLMAPPLNATFIHRQTLAGQVRFTTAELGEIEAKIANAGDRALGLELEIFDRLAGSIDAAGDDLRAAAHAFALLDVATALAKLASDDNYVRPEVDESLAFAIEGGRHPVVEQALKRAGEPFIANACDLSPGPAQKNGQIWLLTGPNMAGKSTFLRQNALIALLAQVGSFVPAIRARIGIVDRLFSRVGAADDLARGRSTFMVEMVETAAILNQASERALVILDEIGRGTATFDGLSIAWAAIEHLHEQNRCRSLFATHYHELTALSAKLPRLFNATVRVKEWRGEVVFLHEVLPGSADRSYGIQVAKLAGLPPSVVSRAKAVLAKLEANDRGQPKTLIDDLPLFAITARAPAEAAPPSEAEQLIDAVKALHPDEMTPREALDALYALKAKLPKAD

SEQ ID NO: 4236 - DNA, 2790 bp, Rhodospirillum rubrum
  CDS (1)..(2790): transl_table=11
gtgttatttttcgctgatcgaagccccttcgtccgtcctctgtcaggatatgcgcctgtgacgcccgccgctccccgttccaccggttccgccgccgccccgccgccctcccccgccgtccttgatgaccggagcggaacggagggcgatgtcacgccgatgatggcccagtatctggccgtcaaggccgcccaccccgattgcttgctattctatcgcatgggcgacttctacgagatgtttttcgaggacgcggtcaaggccgccgagacgctggatatcgccctgaccaagcgcggccggcacgccggggcggatattcccatgtgcggcgtgcccatccactcccacgagggctatctgtcgcggctgatccgcgccggcatcaaggtggcgatctgcgagcagatggaagatcccgccgaggcccggcgccagcgcggctataaggcggtggtgcgccgcgacgtgatccgcgtggtgaccgccggcaccctgaccgaagacgaactgcttgatgcccgcgcccataattatctggccgccgtcgtccgtttgcgcgacgcggtcggcatggcctgggtcgatgtctcgaccggcgatctggtggcccagccgctggccgaggccgatatcggaccggccctggcccgcctcgccccgggcgaggtgctgatgcccgaaaagctggcgggcgatccggcgctgcgcgagatcctggcgcccttggccgggcggatcagcccgctgccggccagccgcttcgatagcgaaaacgcccgcaagcgggtggagggcctgttcggggtcaaggcgctcgatggcttcggtggcttcggccgggccgaggtggcggcgatcggcgccttgatcgattacgtcgaactgacccaggtcggccgcctgccccggctgtcgccgccgcgccggctgtcgcttggcgccatccttgaaatcgacggggcgacccggcgcaatctggaactgaccgaaaccctgggcggcggccgcaagggcagtctgctcgcccgcatcgattgcacggtgaccggggccggggcgcggctgctggccgagcgcttggccgcgccgctgaccgatcccgcgcagatcggcgcccgccttgatggcgtcggcttcctggtcagcgccgagcgggtgcgcggcgatctgcgcgacaccttgcgcggttgtcccgatatcgcgcgcgccctgtcgcggctgtcgttggggcgcggcggtccgcgcgatctcgccgccatcggcgaggcgctgtcgcgcattccggcgctgcgcgtgctggtggtcggcgccggcctgggcgagccgccgaccgaactgaccgccgccttgatcgatctgggcagccacgaggggctggtcgatctgctgggccgggcccttgatgccgacctgccgctgctggcgcgcgatggcggtttcatccgcccgggctatgacgccgggcttgatgaactgcgggcgctgcgcgacgagggccggcggctgatcgccggtctgcaggcgcgctatgccagcgaaaccgccatcccggcgctgaagatcaagcataacaacgtgctgggctatttcatcgaggtcgccgccggtcgcgccgacaagctgatggccgccggcggccccttcctccaccgccagaccctggcctcgcaggtgcgcttcaccacggtggaattgtccgaactggaagacaagatccgcggcgccgccgataaggccctggccctggaacaggcgctgttcgccacgttgtgcgccgaggttctgggctgcgccgccgacatcgcccgcgccgccaacgggctggcctgcctggatgtcgccgccgccctggccgatctggcggcgcgcgagcgctatgcccggccggtggtcgataactccaccgcctttcgcatccacaagggccgccatccggtggtcgaggcggctttggccgatcaggccggcccggccttcgtcgccaatgattgcgacctcgcccccgaccagcggctgtggctgctgaccggccccaatatggccggtaaatccaccttcctgcgccagaacgccctgatcgccgtgctggcgcagatgggatctttcgtgcccgccgaatcggccgagatcggcgtgatcgaccggttgttctcgcgggtgggggcggccgacgatctggcgcgcgggcgctcgaccttcatggtcgaaatggtggagaccgccgccatcctcaatcaggccaccgaacgctcgctggtgatccttgacgagatcggtcgcggcaccgccacctatgacgggctgtcgatcgcctgggccacggtcgagtcgctccacgacgccacccgctgccgggcgctgtttgccacccattaccacgaactgacggcgctggcctcgcgccttgaccggctgtcgtgccacaccttgcgcatcaaggagtggaaggatcaggtggtcttcctgcacgaggtcgggcccggggcggccgaccgctcctatggcatccatgtcgccaagctggccgggctgcccgccgcggtgatcgcccgggccgaacaagtgctggcgatcttggaaaagggcgatgcgtcgagcgcggcgacgcggctggccgatgacctgccgttgttcgccgccgcccgcccgcgtgccggccttcccaccccgccgcccggcccccaccccctggccgaggccctcaacgcgatcaaccccgacgaaatgaccccgcgcgaggcccttgacgccctttaccggctgaaggcggtgatgaagcgggagtag

SEQ ID NO: 4237 - protein, 929 aa, Rhodospirillum rubrum
MLFFADRSPFVRPLSGYAPVTPAAPRSTGSAAAPPPSPAVLDDRSGTEGDVTPMMAQYLAVKAAHPDCLLFYRMGDFYEMFFEDAVKAAETLDIALTKRGRHAGADIPMCGVPIHSHEGYLSRLIRAGIKVAICEQMEDPAEARRQRGYKAVVRRDVIRVVTAGTLTEDELLDARAHNYLAAVVRLRDAVGMAWVDVSTGDLVAQPLAEADIGPALARLAPGEVLMPEKLAGDPALREILAPLAGRISPLPASRFDSENARKRVEGLFGVKALDGFGGFGRAEVAAIGALIDYVELTQVGRLPRLSPPRRLSLGAILEIDGATRRNLELTETLGGGRKGSLLARIDCTVTGAGARLLAERLAAPLTDPAQIGARLDGVGFLVSAERVRGDLRDTLRGCPDIARALSRLSLGRGGPRDLAAIGEALSRIPALRVLVVGAGLGEPPTELTAALIDLGSHEGLVDLLGRALDADLPLLARDGGFIRPGYDAGLDELRALRDEGRRLIAGLQARYASETAIPALKIKHNNVLGYFIEVAAGRADKLMAAGGPFLHRQTLASQVRFTTVELSELEDKIRGAADKALALEQALFATLCAEVLGCAADIARAANGLACLDVAAALADLAARERYARPVVDNSTAFRIHKGRHPVVEAALADQAGPAFVANDCDLAPDQRLWLLTGPNMAGKSTFLRQNALIAVLAQMGSFVPAESAEIGVIDRLFSRVGAADDLARGRSTFMVEMVETAAILNQATERSLVILDEIGRGTATYDGLSIAWATVESLHDATRCRALFATHYHELTALASRLDRLSCHTLRIKEWKDQVVFLHEVGPGAADRSYGIHVAKLAGLPAAVIARAEQVLAILEKGDASSAATRLADDLPLFAAARPRAGLPTPPPGPHPLAEALNAINPDEMTPREALDALYRLKAVMKRE

SEQ ID NO: 4238 - DNA, 2628 bp, Rhodobacter sphaeroides
  CDS (1)..(2628): transl_table=11
gtgagcgacgacaccgtcacgccgatgatggcgcaatatctcgagatcaaggcgcagaaccccggcgccatcctgttctaccggatgggcgacttctacgagatgttcttcgacgacgcggctctggccgccgaggcgctcgacatcgcgctcaccaagcgcggcaagcaccgcggcgaggatatcgccatgtgcggcgtgcccatccatgcggccgagggctatcttctcacgctgatccgcaagggcttccgcgtggccatcgccgagcagatggaggatccggccgaggcgaagaagcgcggctccaagtccgtggtccggcgcgaggtcgtgcgcctcgtcacgcccggcacgctgaccgaggacacgctgctcgaagcgcggcggcacaactacctctgcgccttcgccgagatccgcgacgaggcggcactggcctgggccgacatctcgacgggtgagctcagcgtcacggcctgcccgctgccgcgcctcatgcccgaactggcccgcctcgccccgcgcgagctgctggtggccgacgagcgggagctcgactggatcgaggaggtgggctgcgcgctgacgccgctctcgcgggcgagcttcgacagcgcctcggccgagaagcggctctgcgcgctcttcggcgtgggcacgctcgaaagcttcggcaatttcacccgggccgagctttcggccatgggggcgctggtcgactacctcgacctcacccagcgcggcaagctgccgctcctgcgcccgcccgtgcgcgagacagtaggcggcacggtccagatcgacgccgccacccgtcgcaacctcgagatcacgcaggcgcttgccggaggccgcgacggctcgctcctctccgccgtggatcgcaccgtcaccgctccgggcgcgcgcctgctcgaacggcggctctcgagccccacccgcgacctcggcctgatccacgagaggctcggcgcggtgcgctggctgaccgaagagccgcgcctgcgcgaggaaatgcgcgcgagcctccgccgcgtgcccgacatggaccgcgccctctcgcggctggcactcgaccgggccggtccccgcgatatggccgcgatccgggcaggcctcgcccaggcccaggagatcgcgcagcggatgcccgccgaggcgcccgccctcgtcacccgcgcactcgaggcgctcggcggccacgaggcgctggtggatctcctcgatcaggctctcgtggccgagccgccgcttctcgcccgcgacggcggcttcatcgcacaggggttcgatgcggatctcgacgagacgcgccgcctgcgcgacgagggccgcggcgtcatcgcctcgatgcaggcgggcttcatcgaggtgaccggcatccagagcctgaagatcaagcacaacaacgtgctgggctatttcatcgaggtcacctcgacccatgccgagaagatgctctcggccccgctctccgagcgattcatccaccgccagaccaccgccgggcaggtgcgcttcacgacggtggagctgtcggagctggaaacgcggatcctgaacgcgggcaaccgcgcgctcgacctcgagaagatgcatttcgcagccctgcggacggcgatcctcgatctcgccggccagatcggtcgcgccgcccggtcgctggccgagctcgacctgatctcggccttcgccgacctcgcggtgaccgaggactggaccgagcccgagatcgacgacagccgcgccttcgccatcgaggccgggcgccatccggtcgtcgagcgcgccctgcgccgcaccggcacgcccttcgtcgccaaccactgcgacctctccaccggcgagacgccggcggtctggctcatcaccgggccgaacatggccggcaaatccaccttcctgcgccagaacgccctgatcgcgctcctcgcacaggcgggcagcttcgttccggcccgccgcgcccatatcggcctcgtgagccagatcttcagccgcgtcggcgcctcggacgatctggcgcgcggccgctcgaccttcatggtcgagatggtcgaaaccgcggccatcctgaatcaggccgacgaccgcgctctcgtgatcctcgacgagatcggccgcggcaccgccacctgggacgggctctccatcgcctgggccacgctcgaacatctgcacgaccggaaccgctgccgcgcccttttcgccacccactaccacgagatgaccgcgctggcgggcaagctcaagggcgtggaaaacgcgaccgtcgcggtgaaggaatgggaaggcgacgtgatcttcctgcacgaggtgcggcgcggtgcggccgaccgctcctacggcgtgcaggtcgcacggcttgcgggcctgcccgcctcggtgatcgagcgcgcacgcaccgtgctcgacgcgctcgagtcaggcgagcgcgagagcggcgggcgacgccagacgctcatcgacgacctgccgctcttccgcgcggccccgccgccgcccgcgcccgcggcgccgaagacctcacccgtggaagagcggctgcgcgagatccagcccgacgacctcagcccgcgcgaggcgctgaagctcctctacgatctccgcgcgctgctgacctga

SEQ ID NO: 4239 - protein, 875 aa, Rhodobacter sphaeroides
MSDDTVTPMMAQYLEIKAQNPGAILFYRMGDFYEMFFDDAALAAEALDIALTKRGKHRGEDIAMCGVPIHAAEGYLLTLIRKGFRVAIAEQMEDPAEAKKRGSKSVVRREVVRLVTPGTLTEDTLLEARRHNYLCAFAEIRDEAALAWADISTGELSVTACPLPRLMPELARLAPRELLVADERELDWIEEVGCALTPLSRASFDSASAEKRLCALFGVGTLESFGNFTRAELSAMGALVDYLDLTQRGKLPLLRPPVRETVGGTVQIDAATRRNLEITQALAGGRDGSLLSAVDRTVTAPGARLLERRLSSPTRDLGLIHERLGAVRWLTEEPRLREEMRASLRRVPDMDRALSRLALDRAGPRDMAAIRAGLAQAQEIAQRMPAEAPALVTRALEALGGHEALVDLLDQALVAEPPLLARDGGFIAQGFDADLDETRRLRDEGRGVIASMQAGFIEVTGIQSLKIKHNNVLGYFIEVTSTHAEKMLSAPLSERFIHRQTTAGQVRFTTVELSELETRILNAGNRALDLEKMHFAALRTAILDLAGQIGRAARSLAELDLISAFADLAVTEDWTEPEIDDSRAFAIEAGRHPVVERALRRTGTPFVANHCDLSTGETPAVWLITGPNMAGKSTFLRQNALIALLAQAGSFVPARRAHIGLVSQIFSRVGASDDLARGRSTFMVEMVETAAILNQADDRALVILDEIGRGTATWDGLSIAWATLEHLHDRNRCRALFATHYHEMTALAGKLKGVENATVAVKEWEGDVIFLHEVRRGAADRSYGVQVARLAGLPASVIERARTVLDALESGERESGGRRQTLIDDLPLFRAAPPPPAPAAPKTSPVEERLREIQPDDLSPREALKLLYDLRALLT

SEQ ID NO: 4240 - DNA, 2661 bp, Rickettsia akari
  CDS (1)..(2661): transl_table=11
atgaatattcaagagtttaaacaaaaatataattacgatgttgcaacgaaaatgatgcaacaatatctagacattaaatttgctcatttagattgtttactactatttagaatgggtgatttttatgagatgttctatgatgatgcaatcttagccagcaatgttttaggtattgccttaacaaaaagaggtaaaaacggtgaagaagaaattgcgatgtgcggagtgccttatcatgctcttgagcattacttaactaaactaatcgaagcaaattataaggttgctatttgtgaccagcttgaaacccctgaagatgcaaaaaatagaggcggctataaagcggtagttactagagacgttacacgtattataactccgggaactataattgaagaaaatttaattgcttcagccgaacctaattatttagcaagtctcgtaataccgcaaaataaagaaacggctagcatctgttatgttgatctttctacttccgaaatttttgtagttaatgtgccggaagcggaaattctgaatgagctggctcgtttaaagcctcgtgaaattctagttagcgaaaatttaagatcttctaatcttgcggatagtattttcaaacaattaaattttcgtattacatatcaggttgatagttgttttgcgattaataaatgcaaaaaaatcattttagacttttataaaatgaaagatattaaaggaatcggtgagatatctagcagtcaaatttgtgtcataggcagcattttagaatatttatcgttaacgcaaaaacaaaacatccctcatttaccaatccctagaattatcaattttcatagctatatgactattgatttctctactagacacaaccttgcaattgtaataaactcgcaaggcagctcgaacggaagtttactaaacaccatcaatcatacggttactaaacaaggtggacgtttactatataattttctttccagtcctttaaccaacattgctaaaataaatcatcgtttaaatattaccgagttcttttattctaacttagaaatagtacaaaggattagagaacttctaaaaaaaactagtgatatagaacgctgcctaacacgtattacaatgaacagaagttcaggttgtgatttacttagtattaaatataccttggaagctgcaacgattattaaaggagtattttttgacgcttacggttttaatttacctgattttatcgaaaaaatcatcaaacctctcgcaggcgatgcagaattatatcatttaatagacgagagcataagagcagatgtaccaaataatttaaatgacggaggtataataaaacatgaataccatccgaaagtagctcaattacatgatttaattaataacagaaagttacatattgaaaagctaaaagatcaatatcgcaaagaaactggcatagacagtttaaaaatatctcataataatgttatagggctttttatcgatattaccgctaaaaatgttaataaaatccttgatcccaaatttattcatcgtcaaacaacggttaataatgtccgttacactactactgaactacaaaagcttgaaagcgagttagtcaacgctaaaaccttagtaataagcttggaaaaagcattatatgccgatatttgtagccaagtaatcaaaaaagctgcctatttacgaatgcttgcaagctccttaagcgtgcttgacgtattttgtaattttgcttacatcgctgatgaatatgattatgttaagcctgaattaaccgatgatttaagctttgatatcgttaaaggacggcatcctgtagtagagaaagtactacaacgagaaagcaaaagctttgtatataatgactgtcatttatcggaacttaagcgtatttggttaattaccggtcctaatatggcaggtaaaagtacttttttacgtcaaaacgccattattgcaatcattgctcaaataggttcgtttgtgcctgctaaaagtgccaaaataggggtagtcgataaaatatttagccgaataggtgctgctgatgacttaattaagggacaatcaacctttatggcagagatgcttgaaacctcagcaattcttgctcaatctacaaaaaactcactaataatactggatgaggtaggtagaggcacatccacttatgacggtgtatctatagcgtggtcggtgcttgaatatatccatgataagctaaaatgtcgctgcttgtttgctacgcactatcatgaacttactgttatgaataatttcctgccggctttgcaaaattatactattgctattgaggagtcaggtaaagatattctatttttacataatattatatcaggtgctgctgatagatcttacggtattcatgttgcagctctagcaggactccctgctagcgttataaacagagctgagcagattctgcttaaatttgagaaaacttctaccggtaaaggaaaaaatattttatcaacggaatcaaataatttgcgcttgttcaatcttgaacataatcaaactactataagaagtaaattagaggaacaatttagaactatcgaccctgatcaattatcccctaaagcagcacttgagttgatttatgagttgaagaagttagcttaa

SEQ ID NO: 4241 - protein, 886 aa, Rickettsia akari
MNIQEFKQKYNYDVATKMMQQYLDIKFAHLDCLLLFRMGDFYEMFYDDAILASNVLGIALTKRGKNGEEEIAMCGVPYHALEHYLTKLIEANYKVAICDQLETPEDAKNRGGYKAVVTRDVTRIITPGTIIEENLIASAEPNYLASLVIPQNKETASICYVDLSTSEIFVVNVPEAEILNELARLKPREILVSENLRSSNLADSIFKQLNFRITYQVDSCFAINKCKKIILDFYKMKDIKGIGEISSSQICVIGSILEYLSLTQKQNIPHLPIPRIINFHSYMTIDFSTRHNLAIVINSQGSSNGSLLNTINHTVTKQGGRLLYNFLSSPLTNIAKINHRLNITEFFYSNLEIVQRIRELLKKTSDIERCLTRITMNRSSGCDLLSIKYTLEAATIIKGVFFDAYGFNLPDFIEKIIKPLAGDAELYHLIDESIRADVPNNLNDGGIIKHEYHPKVAQLHDLINNRKLHIEKLKDQYRKETGIDSLKISHNNVIGLFIDITAKNVNKILDPKFIHRQTTVNNVRYTTTELQKLESELVNAKTLVISLEKALYADICSQVIKKAAYLRMLASSLSVLDVFCNFAYIADEYDYVKPELTDDLSFDIVKGRHPVVEKVLQRESKSFVYNDCHLSELKRIWLITGPNMAGKSTFLRQNAIIAIIAQIGSFVPAKSAKIGVVDKIFSRIGAADDLIKGQSTFMAEMLETSAILAQSTKNSLIILDEVGRGTSTYDGVSIAWSVLEYIHDKLKCRCLFATHYHELTVMNNFLPALQNYTIAIEESGKDILFLHNIISGAADRSYGIHVAALAGLPASVINRAEQILLKFEKTSTGKGKNILSTESNNLRLFNLEHNQTTIRSKLEEQFRTIDPDQLSPKAALELIYELKKLA

SEQ ID NO: 4242 - DNA, 2673 bp, Rickettsia conorii
  CDS (1)..(2673): transl_table=11
atgctgcttaatatgaatcttcaagagttgaaacaaaaatataattacgatgttgcaacgaaaatgatgcagcaatatctagacattaaatttgctcatttagattgtttactactatttagaatgggtgatttttatgaaatgttctatgaagatgcaattctagcaagcaatgtacttggcattgctttaacaaagcggggcaaaaacggcgaagaagaaattgcgatgtgcggggtaccttatcatgcccttgagaattatttaactaagttaattgaagcaaattataaggttgctatttgtgatcaactagaaacacctgaagaagcaaagaatagaggcggttataaagcggtcgttactagggatgttacacgtattataactccgggaactataattgaagaaaatttaattgcttcagccgaacctaattatttagcaagtctcgtaataccgaaaaataaagaaacagctagcctttgttatgttgatctttctacttccgaaattgttgtagttaatgtaccggaaacggaaattcttaatgagctggctcgtttaaaacctcgtgaaattctgcttagcgaaaatctgagatcttctaatcttgcggatagtattttcaaacaattaaattttcgtattacctatcaagttgatagtttttttgcgattaataaatgcgaaaaaatcattttagatttttataaaatgaaagatattaaaggaatcggcgagatatctagtagtcaaatttgtgccataggtagcgttttagaatatttatcgttaacgcaaaaacaaaatattcctcatttgccaatccctagaattatcaaatttcatagctatatgactattgatttctctactagacgcaaccttgaaattgtcacaaactcacaaggcggctcgcaaggaagtttattaagcacccttaatcatacggttactaaacaaggtggacgtttactatataattttctttcaagtcctttaaccaacattgctaaaataaatcatcgtttaaatattaccgagttcttttattccaacttagaaatagtaaaaaaaattagagaacttctaaaaaaaactagtgatatagaacgctgcttaacacgtattacgatgaacagaagttcaggtcgtgatttacttagcattaaatatactttagaaacggcaacgattattaaaggagtattctttgacgcttacggttttaatttacctgattttatcgaaaaaattattaaacctctatcaggtgatgcagaattatataatttaatagacgaaacaatacgagaagatgcaccgaataatttaaatgacggaggtataataaaacatgaatatcatccgaaagtagcccaattacatgatttaattaataacggaaaattatatattgaaaagctaaaagatcaatatcgcaaagaaacgggaatagacagtttaaaaatatctcataataatgttatagggctttttatcgatatcaccgctaaaaatgttaataaaatccttgatcccaaatttattcaccgtcaaacaacggttaatcatgttcgttacactactgctgaactacaaaagcttgaaagtgagttagtcaatgctaaaaccttagtaataagcttagaaaaagaattatatgcggatatttgtagccaagtaatcgaaaaagcttcctatttacgaatgcttgcaagctccttaagcgggcttgacgtattttgtaattttgcttacatcgctgatgaatatgattatgttaagcctgagtttaccgatgatttaagctttgatatcgttaaaggacggcatcctgtagtagagaaagcactacagcgagaaagcaaaagctttgtatataatgattgtcatttatcagagcttgagcgtatttggttaattaccggtcctaatatggcaggtaaaagtacttttttacgtcaaaacgccattattgcaatcattgctcaaataggttcgtttgtgccggcaaaaagtgctaaaataggggtagtcgacaaaatatttagccgaataggtgctgccgatgacttaattaagggacaatcgacctttatggcagagatgcttgaaacctcggcaattcttgctcaatctacaaaaaactcactaatcatacttgatgaggtaggtagaggcacatccacttatgacggggtatctatagcatggtcggtgcttgaatatattcatgataagctgaaatgtcgctgtttatttgcaacgcactatcatgagctaaccgttatgagtaatttcctgccggctttgcaaaattatactattgctattgaggagtcaggtaaagatattctatttttacataatattatatcaggtgctgccgataggtcctacggtcttcatgttgcggctcttgccggtcttcctgcgagtgttataaacagagctgagcagattctgcttaaatttgaaaaaacttctacaggtaaaggaaaaaatattttatcaacggaatcaaataatttgagtttgttttatcttgaacctaataaaactactataagcagcaaattagataaaaaattcagcactatcgatcctgataaactatcccctaaagaagcacttgagttaatttatgagttaaagaagttggtttga

SEQ ID NO: 4243 - protein, 890 aa, Rickettsia conorii
MLLNMNLQELKQKYNYDVATKMMQQYLDIKFAHLDCLLLFRMGDFYEMFYEDAILASNVLGIALTKRGKNGEEEIAMCGVPYHALENYLTKLIEANYKVAICDQLETPEEAKNRGGYKAVVTRDVTRIITPGTIIEENLIASAEPNYLASLVIPKNKETASLCYVDLSTSEIVVVNVPETEILNELARLKPREILLSENLRSSNLADSIFKQLNFRITYQVDSFFAINKCEKIILDFYKMKDIKGIGEISSSQICAIGSVLEYLSLTQKQNIPHLPIPRIIKFHSYMTIDFSTRRNLEIVTNSQGGSQGSLLSTLNHTVTKQGGRLLYNFLSSPLTNIAKINHRLNITEFFYSNLEIVKKIRELLKKTSDIERCLTRITMNRSSGRDLLSIKYTLETATIIKGVFFDAYGFNLPDFIEKIIKPLSGDAELYNLIDETIREDAPNNLNDGGIIKHEYHPKVAQLHDLINNGKLYIEKLKDQYRKETGIDSLKISHNNVIGLFIDITAKNVNKILDPKFIHRQTTVNHVRYTTAELQKLESELVNAKTLVISLEKELYADICSQVIEKASYLRMLASSLSGLDVFCNFAYIADEYDYVKPEFTDDLSFDIVKGRHPVVEKALQRESKSFVYNDCHLSELERIWLITGPNMAGKSTFLRQNAIIAIIAQIGSFVPAKSAKIGVVDKIFSRIGAADDLIKGQSTFMAEMLETSAILAQSTKNSLIILDEVGRGTSTYDGVSIAWSVLEYIHDKLKCRCLFATHYHELTVMSNFLPALQNYTIAIEESGKDILFLHNIISGAADRSYGLHVAALAGLPASVINRAEQILLKFEKTSTGKGKNILSTESNNLSLFYLEPNKTTISSKLDKKFSTIDPDKLSPKEALELIYELKKLV

SEQ ID NO: 4244 - DNA, 2661 bp, Rickettsia felis
  CDS (1)..(2661): transl_table=11
atgaatcttcaagaatttaaacaaaaatataattacgatgttgcaacgaaaatgatgcaacaatatctagacattaaatttgctcatttagattgtttactactatttagaatgggtgatttttatgagatgttctatgaggatgcaatcttagccagcaatgtactcggtattgccttaacaaaaagaggtaaaaacggtgaagaagaaattgcgatgtgcggagtgccttatcatgctcttgagaattatttaactaagttaattgaagaaaattataaggttgctatttgtgaccagcttgaaacccctgaagaggcaaaaaatagaggcggttataaagcggtagttactagagacgttacacgtattataactccgggaactataattgaagagaatctaattgcttcagccgaacctaattatttagcaagtcttgtaataacgaaaaataaagaaacggctagcctttgttatgttgatctttctacttccgaaatttttgtagttaatgtaccggaagcggaaattcttaatgagctggctcgtttaaagcctcgtgaaattctgcttagcgaaaacttgagatcttctaatcttgcggatagtattttcaaacaattaaattttcgtattacctatcaggttgatagtttttttgcgattaataaatgcgaaaaaatcattttagacttttataaaatgaaagatattaaaggaatcggtgagatatctagcagtcaaatttgtgccataggtagcattttagaatatttatcattaacgcaaaaacaaaatattcctcatttaccaatccctagaattatcaattttcatagctatatgactattgatttcgcaactagacgcaaccttgaaattgtaacaaactcacaagggaccctgaaaggaagtttactaaacactctcaatcatacggttactaaacaaggcggacgtttactatataattttctttcaagtcctttaaccaacattgctaaaataaatcatcgtttaaatattaccgagttcttttattccaacttagaaatagtaaaaagaattagagaacttctaaaaaaaactagtgatatagaacgctgcctaacacgtattacaatgaacagaagttcaggtcgtgatttacttagtattaaatataccttggaagctgcaacgattattaaaggagtattttttgacgcttacggttttaatttacctgattttatcgaaaaaattattaaacctctatcaggtgatgcggaattatataatttaatagacgagagcataagagaagatgcaccgaataatttaaatgacggaggtataataaaacatgaatatcatccgaaagtagcccaattacatgatttaattaataacgggaaattacatattgaaaagctaaaagatcaatattgcaaagaaacgggcatagacagtttaaaaatatctcataataatgttatagggctttttatcgatattaccgctaaaaatgttaataaaatccttgatcccaaatttattcaccgtcaaacaacggttaatagtgtccgttacactactactgaactacaaaagcttgaaagcgagttagccaacgctaaaaccttagtaataagcttagaaaaagaattatatgcggatatttgtaaccaagtaatcgaaaaagcttcctatttacgaatgcttgcaagctccttaagcggacttgacgtattttgtaattttgcttatatcgctgatgaatatgattatgttaagcctgaatttaccgatgatttaagctttgatatcgttaaaggacggcatcctgtagtagaaaaagcactaaagcgagaaagcaaaagctttgtatataatgattgtcatttatcggagtttgagcgtatttggttaattaccggtcctaatatggcaggtaaaagtacttttttacgccaaaacgccattattgcaatcattgctcaaataggttcgtttgtgcctgctaaaagtgccaaaataggagtagtcgacaagatatttagccgaataggtgctgctgatgacttaattaggggacaatcaacctttatggcagagatgcttgaaacttcggcgattcttgctcaatctacaaaaaactcactaataatacttgatgaggtaggtagaggcacatccacttatgacggtgtatctatagcgtggtcggtgcttgaatatatccatgataagctaaaatgtcgctgtttatttgcaactcactatcatgagctaaccgttatgagtaatttcctaccggctttgcaaaattatactattgctattgaggagtcaggtaaagatattctgtttttgcataatattatatctggggctgccgatagatcttacggtattcatgttgcagctttagcaggactccctgccagcgttataaatagagctgagcagattctgcttaaatttgagaaaacttctaccggtaaaggaaaaaatatcttatcgacggaatcaaataatttgagtttgtttaatcttgagcctaataaaactactataagcagcaaattagatgagcaatttagaactatcgcccctgataaactatcccctaaagaagcacttgaattgatttatgagttaaagaagttggtttga

SEQ ID NO: 4245 - protein, 886 aa, Rickettsia felis
MNLQEFKQKYNYDVATKMMQQYLDIKFAHLDCLLLFRMGDFYEMFYEDAILASNVLGIALTKRGKNGEEEIAMCGVPYHALENYLTKLIEENYKVAICDQLETPEEAKNRGGYKAVVTRDVTRIITPGTIIEENLIASAEPNYLASLVITKNKETASLCYVDLSTSEIFVVNVPEAEILNELARLKPREILLSENLRSSNLADSIFKQLNFRITYQVDSFFAINKCEKIILDFYKMKDIKGIGEISSSQICAIGSILEYLSLTQKQNIPHLPIPRIINFHSYMTIDFATRRNLEIVTNSQGTLKGSLLNTLNHTVTKQGGRLLYNFLSSPLTNIAKINHRLNITEFFYSNLEIVKRIRELLKKTSDIERCLTRITMNRSSGRDLLSIKYTLEAATIIKGVFFDAYGFNLPDFIEKIIKPLSGDAELYNLIDESIREDAPNNLNDGGIIKHEYHPKVAQLHDLINNGKLHIEKLKDQYCKETGIDSLKISHNNVIGLFIDITAKNVNKILDPKFIHRQTTVNSVRYTTTELQKLESELANAKTLVISLEKELYADICNQVIEKASYLRMLASSLSGLDVFCNFAYIADEYDYVKPEFTDDLSFDIVKGRHPVVEKALKRESKSFVYNDCHLSEFERIWLITGPNMAGKSTFLRQNAIIAIIAQIGSFVPAKSAKIGVVDKIFSRIGAADDLIRGQSTFMAEMLETSAILAQSTKNSLIILDEVGRGTSTYDGVSIAWSVLEYIHDKLKCRCLFATHYHELTVMSNFLPALQNYTIAIEESGKDILFLHNIISGAADRSYGIHVAALAGLPASVINRAEQILLKFEKTSTGKGKNILSTESNNLSLFNLEPNKTTISSKLDEQFRTIAPDKLSPKEALELIYELKKLV

SEQ ID NO: 4246 - DNA, 2676 bp, Rickettsia prowazekii
  CDS (1)..(2676): transl_table=11
atgaccttgtgtaatatgaatcttcacgaatttagacaaaaatataattacaatgttgcaacaaaaatgatgcagcaatatctagacattaaatttgctcatttagattgtttgctactatttagaatgggtgatttttatgagctgttctatgaagatgcaatcttagcaagtaatatacttggcatagctttaacaaaaagaggcaaaaactgcgaagaagaaataccgatgtgtggtgtgccttatcatgcacttgagcattatctaactaagctaatcgaagaaaattataaagttgctatttgtgatcagcttgaaacacctgaagaagcaaaaaagagagatggctataaagcagtagtgacgagagatgtaacacgtattataacgccaggtactataattgaagagaacttaattagtgtaacagaacctaattatttaacaagtctcgtaataccaaaaaataaaaaaacggctagcatttgttgcgttgatctttctacttctaaaatttttgtaattaatgtaccagaaacagaaattctgaatgaacttgcacgtttaaaatctcgtgaaattctgcttagcgagaacctaaaatcttctaacatttctgatagtattttaaaacaatttaattgtcgtattacctatcaggttgatagtttttttgcaattaataaatgtgaaaaaataattttagatttttataaaataagagatattaaaggaataggggagatatctaatagtcaaatttgtgccataggcagtattttagaatatttatcgctaactcaaaaacaaaacattccgcatttaccaatccctaaaattatcaattttcataactatatgactattgatttttctactagacgtaaccttgaaattgtaacaaatttacaaggcaacttatacggaagtgtactaaacacactaaatcatacagttactacacaaggtggacgtttactatatcattttctttcaagtcctttaacaaatattgctaaaataaatcatcgtttaaatattaccgagttcttttattctaacttaggaatcgtcacaagaattagagaacttcttaaaaacactagtgatatagaacgttgcttaacacgtatcacaatgaatagaagttctggtcgtgacttactgagtattaaatatactttagaaacagcaaagacaattaaaggcttattttctgaatcttatggtctgaatttacctcattttatcgaaaaaattattaaacctctatcaggcgatgcagaattatataatttaatacacatgagtataagagaagatgctccgaataatttaaatgatggtggtataatcaaatatgaatttcatccaaaaatagctcaactaaatgacttaattaataacaagaaattacatgttgaaaagttaaaagatcaataccgcaaagaaacacgcatagaaagtttaaaaatatctcataataatgttctaggattttttatcgatattacccctaaaaatgtaaataaaattcttgatcctaaatttattcatcgtcaaacaactatcaatagcgtacgttatactacctacgaattacaaaatcttgaaaacgaattagttaatgctcaaaccttagtaataagattagaaaaagaattatatacagatatatgtagaaaagtaatcgaaaaatcttcctatttaaaaatactagcaaactccttaagtggacttgatgtattttgtaattttgcttatatcgctgatgaatatgattatactaaacctgaatttacaaatgacttaagctttgatatagttaaaggccgacatcctgtagtagaagcagctttacgtaagactagtaaaagctttgtgtataatgactgtcatttatcagaagcagagcgtatttggttaattaccggtcctaatatggcaggtaaaagtacttatctgcgtcaaaacgctatcattacaatcattgctcaaataggttcttttgtgcctgctaaaagcgccaaaataggggtagttgataaaatatttagccgaataggtgctgcagatgatttaattaaaggacaatcaacatttatggcagaaatgcttgaaacttcggctattcttgcgcaatctacaaaaaactcactcattatccttgatgaagttggcagaggcacttctacttatgatggagtatctatagcatggtcagtacttgaatatattcacgataagttacaatgtcgttgtttatttgcaacccattatcatgagctaacagttatgaagaattttctgcctgctttacaaaactatactatcgccattgaagagtcaggtaaagatattctgtttttgcataatattatattaggtgcttccaataaatcttacggtcttcatgtcgctgctttagcaggactacctacaagtgtgataaatagagctgcacagattttactgaaatttgagaaaatttctataagcaaagaaaaaaatattttatcaaatgcatcaaataacttgagtttgttcaattttgaacacgagaaacctatatctaatagtaagctagatgaagagtttaaaactatcgatcctgataaaatttcccctaaagaagcactggagttgatttataagtttaaaaaattggtttaa

SEQ ID NO: 4247 - protein, 891 aa, Rickettsia prowazekii
MTLCNMNLHEFRQKYNYNVATKMMQQYLDIKFAHLDCLLLFRMGDFYELFYEDAILASNILGIALTKRGKNCEEEIPMCGVPYHALEHYLTKLIEENYKVAICDQLETPEEAKKRDGYKAVVTRDVTRIITPGTIIEENLISVTEPNYLTSLVIPKNKKTASICCVDLSTSKIFVINVPETEILNELARLKSREILLSENLKSSNISDSILKQFNCRITYQVDSFFAINKCEKIILDFYKIRDIKGIGEISNSQICAIGSILEYLSLTQKQNIPHLPIPKIINFHNYMTIDFSTRRNLEIVTNLQGNLYGSVLNTLNHTVTTQGGRLLYHFLSSPLTNIAKINHRLNITEFFYSNLGIVTRIRELLKNTSDIERCLTRITMNRSSGRDLLSIKYTLETAKTIKGLFSESYGLNLPHFIEKIIKPLSGDAELYNLIHMSIREDAPNNLNDGGIIKYEFHPKIAQLNDLINNKKLHVEKLKDQYRKETRIESLKISHNNVLGFFIDITPKNVNKILDPKFIHRQTTINSVRYTTYELQNLENELVNAQTLVIRLEKELYTDICRKVIEKSSYLKILANSLSGLDVFCNFAYIADEYDYTKPEFTNDLSFDIVKGRHPVVEAALRKTSKSFVYNDCHLSEAERIWLITGPNMAGKSTYLRQNAIITIIAQIGSFVPAKSAKIGVVDKIFSRIGAADDLIKGQSTFMAEMLETSAILAQSTKNSLIILDEVGRGTSTYDGVSIAWSVLEYIHDKLQCRCLFATHYHELTVMKNFLPALQNYTIAIEESGKDILFLHNIILGASNKSYGLHVAALAGLPTSVINRAAQILLKFEKISISKEKNILSNASNNLSLFNFEHEKPISNSKLDEEFKTIDPDKISPKEALELIYKFKKLV

SEQ ID NO: 4248 - DNA, 2676 bp, Rickettsia typhi
  CDS (1)..(2676): transl_table=11
atgaccttgtgtaatatgaatctttacgagtttagacaaaaatataattacgatgttgcaacaaaaatgatgcaacaatatctagacattaaatttgctcatttagattgtttgctactatttagaatgggtgatttttatgaactattctatgaagatgcaatcttagcaagtaatatacttggcatagctttaacaaaaagaggtaaaaactgcgaagaagaaataccaatgtgtggtgtgccttatcatgcacttgagcattacttaactaagctaattacagaaaattataaagttgctatttgcgatcagcttgaaacccctgaagaagcaaaaaagagaggtggctataaagcagtagtcacaagagatgttacacgtattataactccaggaactataattgaagagaacttaattagtgcagcagaacctaattatttaacaagtctcgtaatgacaaaaaataaaaaaacggctagcatttgttacgttgatctttctacttctaaaatttttatagttaatgtaccagaaacagaaattctgaatgaactagcgcgtttaaaatctcgtgaaattctgctgagcgaaaacctaaagtcttctaaccttgctgatagtattttaaaacaatttaattgtcgtattacctatcaggtcgatagtttttttgcaattaataaatgtgaaaaaatcattttagatttttataaaataagagatattaaaggcataggtgagatatctagtagtcaaatttgtgccataggcagtattttagaatatttatcattaactcaaaaacagaatattcctaatttaccaatccctaaaattatcaattttcatagctatatgactattgatttctctactagacgtaaccttgaaattgtaacaaatatacaaggaaacttacacggaagtgtactaaatacactaaatcatacagtgactaaacaaggtggacgtttactatatcattttctttcaagtcctttaactaatattgctaaaataaatcgtcgtttaaatattaccgagttcttttattctaacttaggaatagttacaagaattagagaacttcttaaaaacactagtgatatagaacgttgcttaacacgtatcacgatgaatagaagttctggtcgtgacctactgagtattaaatatactttagaaacggcaaagataattaatggattattttctgaatctcatagtctaaatttacctaattttatcgggaaaattattaaacctctatcaggtgatgcagaattatataatttaatagacatgagtataagagaagatgcaccgaataatttaaatgatggtggtataattaaacatgaatttcatccaaaagtagcgcaactaaatgacttaattaataacgggaaattacatgttgaaaagctaaaagatcaataccgcaaagaaacaggcatagacagtttaaaaatatcccataataatgttctagggctttttattgatattaccgctaaaaatgtcaataaaattcttgatcctaaatttattcatcgtcaaacaactgtcaatagcgtacgttatactacatacgaattacaaaatcttgaaaatgaattagtgaatgctcaaaccttagtaataagcttagaaaaagaattatatacagacatttgtaggaaagtaatcgaaaaatcttcctatttaagaatactcgcaaactccttaagtgggcttgatgtattttgtaattttgcttatattgctgatgaatataattatactaaacctgaatttacaaatgacttaagctttgatatagttaaaggacgacatccagtagtagaagcagctttactaaagactagtaaaagttttgtatataatgactgtcatttatcagaagcagagcgtatttgcttaattaccggtcctaatatggcaggcaaaagtacttatctgcgtcaaaacgctatcattacaatcattgctcaaataggttcttttgtgcctgctaaaagcgctaaaataggtgtagttgataaaatatttagccgaataggtgctgcagatgatttaattaaaggacaatcaacattcatggcagaaatgcttgaaacttcagccattcttgctcaatctacaaaaaactcactcattatccttgatgaagttggcaggggcacttctacttatgatggagtatctatagcatggtcagtacttgaatatattcatgataaactgaaatgtcgttgtttatttgcaacacattatcatgagctaacagttatgaagaattttcttcctgctttacaaaactatactatcgccattgaagagtcaggtaaagatattctgtttttgcataatattatattaggtacttccaataaatcttacggtcttcacgttgctgctttagcaggactacctacaagtgtcataaatagagctgcacagattttactaaaatttgagaaaatttctataagcaaaggaaaaaatattgtatcaacggcatcaaataacttgagtttattcaattttgaacctcagaaacatatatctaatagtaagctagatgaagagtttaaaactatcgaccctgataaaatttctcctaaagaagcgcttgagttgatttataagtttaaaaaattggtttaa

SEQ ID NO: 4249 - protein, 891 aa, Rickettsia typhi
MTLCNMNLYEFRQKYNYDVATKMMQQYLDIKFAHLDCLLLFRMGDFYELFYEDAILASNILGIALTKRGKNCEEEIPMCGVPYHALEHYLTKLITENYKVAICDQLETPEEAKKRGGYKAVVTRDVTRIITPGTIIEENLISAAEPNYLTSLVMTKNKKTASICYVDLSTSKIFIVNVPETEILNELARLKSREILLSENLKSSNLADSILKQFNCRITYQVDSFFAINKCEKIILDFYKIRDIKGIGEISSSQICAIGSILEYLSLTQKQNIPNLPIPKIINFHSYMTIDFSTRRNLEIVTNIQGNLHGSVLNTLNHTVTKQGGRLLYHFLSSPLTNIAKINRRLNITEFFYSNLGIVTRIRELLKNTSDIERCLTRITMNRSSGRDLLSIKYTLETAKIINGLFSESHSLNLPNFIGKIIKPLSGDAELYNLIDMSIREDAPNNLNDGGIIKHEFHPKVAQLNDLINNGKLHVEKLKDQYRKETGIDSLKISHNNVLGLFIDITAKNVNKILDPKFIHRQTTVNSVRYTTYELQNLENELVNAQTLVISLEKELYTDICRKVIEKSSYLRILANSLSGLDVFCNFAYIADEYNYTKPEFTNDLSFDIVKGRHPVVEAALLKTSKSFVYNDCHLSEAERICLITGPNMAGKSTYLRQNAIITIIAQIGSFVPAKSAKIGVVDKIFSRIGAADDLIKGQSTFMAEMLETSAILAQSTKNSLIILDEVGRGTSTYDGVSIAWSVLEYIHDKLKCRCLFATHYHELTVMKNFLPALQNYTIAIEESGKDILFLHNIILGTSNKSYGLHVAALAGLPTSVINRAAQILLKFEKISISKGKNIVSTASNNLSLFNFEPQKHISNSKLDEEFKTIDPDKISPKEALELIYKFKKLV

SEQ ID NO: 4250 - DNA, 2664 bp, Saccharophagus degradans
  CDS (1)..(2664): transl_table=11
atgaacagtacatctaccgctacgcccattgctaacgaaaaccacacccctatgatgcagcaatacctgcgcattaaggcagagcaccccaatgagattgtgttttaccgtatgggggatttttatgagttgtttttcgatgatgcaaaaaaagcggcgaagctattagatgtaacccttaccgcacgcggtaaatccaacggcgagcctattcctatggcgggcgtgccctaccacgcagccgaaaactatttggctaagcttgtgcgtttgggggtttcagttgccattgtagagcaggtaggtgacccagctaccaccaaagggccggtagagcgcaaagttatgcgcattgttaccccaggcacggttagtgatgaagcgctgctagatgaaactcgcgataaccttttggtggctatcaccttaaaagatgagcgctatggcattagctctttagatatgggcagtggccgctttaccgtatttgaagttgccgacgaagaggcattaataggcgaaattgagcgcttacagccagccgaattgcttgccccagaattgcttaccgtacctaatattataagcttgcgtgcaggctatagacgccgcccagattgggagtttgaatacgatacagcccagcgcttgctcacccgccattttggcacgcaagatttaagcggttttggttgcgaagactttaccgcaggtattagcgccgcggggtgcttatttgcatatgcacaagaaacccaaaaaacgacgctaagccacgttgccaaattagtattggataacccagaaaccaaagtaacactggatgcagcaacacgccgtaacttagagttagacactaacctagccggcacagaagacaacacattatttagcgtgttaaatactaccaccacagcaatgggtgggcgcttattgcgccgctggttacattcaccactgcgcgatatttacatacttaaccagcgccaaagcgctatagaagcgctgttagataattatcaatttgaaccgctacgtcacaccttaaaacacattagtgacttagaacgtattttgggccgcttggctttgcgctctgctcggccgcgcgacttgtcgcgtttatgtgcatctattgcggagtttcccgcaattcaacagcatttaaacggtattgatagcccgctactaaaaaaactagcaaaagaaattcgagaattcccagacctagttgatttgcttagccgtgccttaatggaaaacccaccggtagttattcgcgaaggcggggttattgcagaagggttcgatgaagagctagacgagctgcgcgcaattagtacaaatgccggtgattatttaattaagttagaagaacaagagcgtgctaaaaccggtctttctacgcttaaagtgggctacaaccgcgtacacggttactacattgaaattagtaaatcgcaagctagctcggcgccaacagaatatattcgcaggcaaacacttaaaaatgccgagcgttttattacgccagaattaaaaacttttgaagataaagccttgtctgcaaaaagccgtgcgctcgcgcgtgaaaaaggcttgtacgatgatcttatcgaaaccctcaacgagcaattgcgcgaactacaagttgcggcttctggcgttgccgagctagatgtattaaccacattagccgagcgttcaaacctattaaacttttgcaagccagagctgtacgaaggcgaaggcatttttatcgaacaaggtcgccaccctgtggttgaacaggtgttagatgacccgttcgtacctaacgacttactactagataccgaccaacggatgctaatcattaccggccccaacatgggcggtaagtcgacttacatgcgacaaacagcgcttattgtgctgctggcgcaaattggctgctacgtaccggccagcgcttgcaagctgggcttggtagatcgcatatttactcgtattggctcatcagacgatttggcaggcggccgctctacttttatggtggaaatgaccgaaaccgccaatattctaaacaacgctacccgcaacagccttgtgcttatggatgagattggtcgcggtaccagtacctacgacggcctgtcgctggcgtgggcatgcgtggaacatctcgctaacaacttgcacgcatttaccctgttcgccacccattactttgagctaaccggcttgccgaaagcattagctggcgtgcaaaacgtacatttggatgcaaccgagcacaacgactcgattgtttttcttcacaaaatacaacccggccctgccagcaagagctttggtttgcaggtggcaaaactagctggtattccttccaacgtgattgccgacgcgggcggtcacttgcgcaggttagaggcccagccgacggtagacacgccgcaccaattcccggcccccgagcctattgccttgcaagagccggttgcggaaccagaacccaacaaaccagctgctgctgccaaaaccaaaccggctagcccgcaacccgatttgtttgcgagcgcggccccttcggctgtggaaataaaactgagaagcattaaccccgataatttaaccccgagacaagctttacaggccttatacgatttaaaagatataagttag

SEQ ID NO: 4251 - protein, 887 aa, Saccharophagus degradans
MNSTSTATPIANENHTPMMQQYLRIKAEHPNEIVFYRMGDFYELFFDDAKKAAKLLDVTLTARGKSNGEPIPMAGVPYHAAENYLAKLVRLGVSVAIVEQVGDPATTKGPVERKVMRIVTPGTVSDEALLDETRDNLLVAITLKDERYGISSLDMGSGRFTVFEVADEEALIGEIERLQPAELLAPELLTVPNIISLRAGYRRRPDWEFEYDTAQRLLTRHFGTQDLSGFGCEDFTAGISAAGCLFAYAQETQKTTLSHVAKLVLDNPETKVTLDAATRRNLELDTNLAGTEDNTLFSVLNTTTTAMGGRLLRRWLHSPLRDIYILNQRQSAIEALLDNYQFEPLRHTLKHISDLERILGRLALRSARPRDLSRLCASIAEFPAIQQHLNGIDSPLLKKLAKEIREFPDLVDLLSRALMENPPVVIREGGVIAEGFDEELDELRAISTNAGDYLIKLEEQERAKTGLSTLKVGYNRVHGYYIEISKSQASSAPTEYIRRQTLKNAERFITPELKTFEDKALSAKSRALAREKGLYDDLIETLNEQLRELQVAASGVAELDVLTTLAERSNLLNFCKPELYEGEGIFIEQGRHPVVEQVLDDPFVPNDLLLDTDQRMLIITGPNMGGKSTYMRQTALIVLLAQIGCYVPASACKLGLVDRIFTRIGSSDDLAGGRSTFMVEMTETANILNNATRNSLVLMDEIGRGTSTYDGLSLAWACVEHLANNLHAFTLFATHYFELTGLPKALAGVQNVHLDATEHNDSIVFLHKIQPGPASKSFGLQVAKLAGIPSNVIADAGGHLRRLEAQPTVDTPHQFPAPEPIALQEPVAEPEPNKPAAAAKTKPASPQPDLFASAAPSAVEIKLRSINPDNLTPRQALQALYDLKDIS

SEQ ID NO: 4252 - DNA, 2583 bp, Salmonella arizonae
  CDS (1)..(2583): transl_table=11
atgagtaaaatcaatatgaatgaagacattgataaggacttctctagccataccccgatgatgcagcagtatctcaagctgaaggcccagcatccggagatcctgctgttttatcgtatgggcgacttttacgagctgttttatgacgacgcaaagcgtgcgtcgcagttgctcgatatttcgctgaccaaacgcggcgcatcggctggcgaacctatccccatggcgggtatcccgcaccacgccgtagaaaactatctcgcaaaactggtcaatcagggcgaatccgtcgctatttgcgaacagattggcgacccggccaccagcaaaggccccgttgaacgtaaggtcgtgcgtatcgttacgcctggcaccatcagcgatgaagccctgttacaggaacgtcaggataacctgctggcggctatctggcaggatggtaaaggctacggctacgccacgctggatatcagctccgggcgctttcgtctgagcgagcccgccgaccgtgaaaccatggcagcagagttgcaacgcacgaatcctgccgaattattgtatgccgaagattttgctgaaatggcgttgatagagggacgtcggggcttacgccgccgtccgctgtgggagtttgagattgataccgcccgtcagcagctaaatttacaattcggtacgcgggatctggtcggcttcggcgtcgaaaatgcctcgcgtggattatgtgcggcgggctgcctgttacagtacgtaaaagatacgcagcgcacctccctgccgcatattcgctccattacgatggaacgccagcaggacagcatcattatggatgccgcgacccgccgcaatctggaaattacccagaacctggccggcggtatcgaaaataccctcgctgcggtgcttgattgtaccgtgacgccaatgggtagccgaatgcttaaacgctggctgcacatgccgataagaaataccgacatattgcgtgaacgccagcagaccatcggcgccttgcaggacaccgtcagcgagctgcaacccgtgctgcgtcaggtcggcgatctggagcgcattcttgcccgtctggcgctacgcaccgcgcgtccgcgcgacctcgcccgaatgcgtcacgccttccagcaactgccggaattgcacgctcagcttgaaaccgttgacagcgcgccggtgcaggcgttgcgtaaaaaaatgggcgattttgccgaactacgcgacctcctggaacgcgccattattgacgcgccgccggtactggtccgcgacggcggcgttattgcccccggctatcaccaggagctggatgaatggcgcgcgctggcggacggcgccaccgactacctcgatcgtctggaaattcgcgagcgcgagcgtaccggactggatacgctgaaagtcggctataacgcggtacatggctattacattcagattagccgtggtcaaagccatctggcgccaatcaattatgtgcgtcgccagacgctgaaaaatgccgaacgctacattattcctgagctgaaagagtacgaagataaagttctgacctctaaaggcaaagctctggcgctggaaaaacagctttacgacgaattatttgatttgttgttgccgcatctggcggatttgcagcagagcgcaagcgcgctggcggaactggatgtgctggttaatctggctgaacgcgcttatacgctgaattacacctgtccgacgtttaccgataaacccggtattcgtatcatcgaaggtcgccaccctgtggtggagcaggttctgaatgagccgtttatcgctaacccgcttaatctgtcgccgcaacgccgtatgttgatcatcactggccctaatatgggcggtaaaagtacctatatgcgacaaacggcattgatcgcgctgctggcctggattggcagttacgtgccggcgcaaaatgtggaaatcggcccgatcgaccgtatttttacccgcgtcggcgcagcggacgacctggcctccggacgctcaacctttatggtggagatgaccgaaaccgcgaacattctgcataacgccacagaaaacagcttggtattgatggatgaaatcggacgcggcacctccacgtatgacgggttgtcgctggcctgggcctgcgcggagaacctcgccaataagattaaagcgttaacgcttttcgccacccactactttgagctgactcagttgccggagaaaatggaaggcgtagcgaacgtccacctggatgcgctggaacacggcgataccatcgcttttatgcacagcgtgcaggacggcgcggcaagcaagagttacggcctggcggtcgcggcgcttgcgggcgtccctaaagaggtgatcaaacgcgcgcgccaaaaactccgcgagctggagagcatctcgcccaatgcggcggcaacgcaggtggacggcacgcaaatgtcgttgcttgccgctccggaagagacatcgcccgccgttgaagcgctggagaatctcgatccggactccctgacgccacgccaggcgctggagtggatctatcggctgaaaagtctggtgtaa

SEQ ID NO: 4253 - protein, 860 aa, Salmonella arizonae
MSKINMNEDIDKDFSSHTPMMQQYLKLKAQHPEILLFYRMGDFYELFYDDAKRASQLLDISLTKRGASAGEPIPMAGIPHHAVENYLAKLVNQGESVAICEQIGDPATSKGPVERKVVRIVTPGTISDEALLQERQDNLLAAIWQDGKGYGYATLDISSGRFRLSEPADRETMAAELQRTNPAELLYAEDFAEMALIEGRRGLRRRPLWEFEIDTARQQLNLQFGTRDLVGFGVENASRGLCAAGCLLQYVKDTQRTSLPHIRSITMERQQDSIIMDAATRRNLEITQNLAGGIENTLAAVLDCTVTPMGSRMLKRWLHMPIRNTDILRERQQTIGALQDTVSELQPVLRQVGDLERILARLALRTARPRDLARMRHAFQQLPELHAQLETVDSAPVQALRKKMGDFAELRDLLERAIIDAPPVLVRDGGVIAPGYHQELDEWRALADGATDYLDRLEIRERERTGLDTLKVGYNAVHGYYIQISRGQSHLAPINYVRRQTLKNAERYIIPELKEYEDKVLTSKGKALALEKQLYDELFDLLLPHLADLQQSASALAELDVLVNLAERAYTLNYTCPTFTDKPGIRIIEGRHPVVEQVLNEPFIANPLNLSPQRRMLIITGPNMGGKSTYMRQTALIALLAWIGSYVPAQNVEIGPIDRIFTRVGAADDLASGRSTFMVEMTETANILHNATENSLVLMDEIGRGTSTYDGLSLAWACAENLANKIKALTLFATHYFELTQLPEKMEGVANVHLDALEHGDTIAFMHSVQDGAASKSYGLAVAALAGVPKEVIKRARQKLRELESISPNAAATQVDGTQMSLLAAPEETSPAVEALENLDPDSLTPRQALEWIYRLKSLV

SEQ ID NO: 4254 - DNA, 2634 bp, Silicibacter pomeroyi
  CDS (1)..(2634): transl_table=11
ttgaccaccgtcacgcccatgatggcacaatatctggaaatcaaagaggcttatgccgatgccctgctgttctatcgcatgggcgatttctacgagatgttctttgacgacgcggtcgccgcggccgaggcgctggatatcgcgctgaccaagcgcggcaagcacgagggcgaggatattccgatgtgcggcgtcccggtccacgccgccgagggctatctgctgaccctgatccgtaagggattccgggtagcggtctgcgaacagatggaaagcccggccgaggccaagaagcgtggatcgaaatcggtggtccggcgcgatgtggtgcggctggtcaccccgggcaccctgaccgaggacgcgctgcttgaggcgcgtcgccacaattttctggtggcttatgccgaggtgcgcagtggcgcggcgctggcctgggccgatatctcgaccggtgatttccacgtgatgccggtgacccgcccgcgcctcagcccggaactggcgcggctggccccgtccgagctgctggtggtcgatgaaccggtgttccagcagctgcgcccgctggctgacgatcaccgcattccgctgaccccactgggcaaggccagtttcgacagcatggccgccgaaaagcgcctgtgcgagctgtacaaggttggctcgctggaggggttcggtacgttcgcgcgcgccgaactgtcggccatgggtgcgctgatcgactatttggacatcacgcaaaagggcaaactgccgctgctgcaacccccggtgcaagaggctgaggatcgggtgatgcagatcgacgccgccacgcgacgcaatctggagctgacccgttccctgtcaggcgagcgcggcggctcgctcttgtcggtgatcgaccgcacggtcacgccggggggcgcccgcctgctggaacagcgccttggcagcccgtcgcgcaacctggatgtaatccacgcccggctttcggcgctggatttctgcatcgaccattcgaccctggccgccgacctacgtgcggccctgcgcaagacgcccgatctggaccgtgccctttcgcggctggcgctggaccggggcgggccgcgcgaccttgccgcgatccgcaacgggctgggtcaggccgaggcgattgcggccctctgcgacgggctggaactgcccggcttgatcgcgggtgcctgcgccgatctgaacgggttcgacgagttgcttggcctgctcgacaccgcgttggtggccgaaccgccgctactagcccgtgatggcggctttatcgcgccaggctatgacagcgatttggacgaggcgcgcgagctgcgcgacaagggccgtggcgtcatcgccgggatgcagcagaaatatgccgaacataccggcatcgcctcgctgaagatcaagcacaacaacgtgctgggctacttcatcgaaaccaccgcgacccacgcggccaagatgctgaacccgcccctgagcgagacctatatccaccgccagaccacagccaatcaggtgcgctttactacggtcgaactgagcgagttggaaacccgtatcctgaacgccggtaatcacgcgctcgagatcgaaaagcggctctattcaagcctttccggggcagttctggagcaggccgcccgccttaatatcgccgcacgcggcctggccgaactggatctggccaccgcgctggccgatctggcgcgcgccgaaaactggtgcaggcccagcgtcgatccctcgcgcgcctttgccatcgaaggcggccgccacccggtggtggaacacgcgctgcgccgtcaggggggggatccttttgtggccaatgactgcgatctcagcgccgacaagggcgccgcgatccgcctgctgaccggccccaacatggctggtaaatcgacctatctgcggcagaacgcgctgatcaccctgctggcccagatcggcagttacgtgcccgccgacagcgcccatatcggggtggtcagccagttgttcagccgcgtcggcgcctcggacgatctggcgcgcggccgctcgaccttcatggtcgagatggtggaaaccgccgccatcctgaaccaggccgacgaccatgcgctggtcatcctggacgagatcgggcgcggcaccgccacctatgacgggctttccatcgcctgggccacgctggaacatcttcacgcgaccaatcgctgccgcgctctgttcgccacccattaccatgaattgaccgcgctcgccgcgaccctcgacggggtcgagaacctgaccgtcgcggtcaaagagtgggagggcgaggtgatattcctgcacgaggtgcgcaaaggcgccgccgaccgctcttatggtgtgcaggtcgcccagcttgcgggcctgccgccttcggttgtcgcgcgtgcccgggtggttctggaccagctggagaaatccgaacgcgagggcggcaagcaaaaggcgctgatcgacgatctgccgctgttctcggccgcgccgccactgccaccacccgcgcccaaaacctcacccgccgatgcgatgctcaaggagatccaccccgacgagctgaccccccgccaggcgctggagatgctttataaactgaaagaggcggcccgctga

SEQ ID NO: 4255 - protein, 877 aa, Silicibacter pomeroyi
MTTVTPMMAQYLEIKEAYADALLFYRMGDFYEMFFDDAVAAAEALDIALTKRGKHEGEDIPMCGVPVHAAEGYLLTLIRKGFRVAVCEQMESPAEAKKRGSKSVVRRDVVRLVTPGTLTEDALLEARRHNFLVAYAEVRSGAALAWADISTGDFHVMPVTRPRLSPELARLAPSELLVVDEPVFQQLRPLADDHRIPLTPLGKASFDSMAAEKRLCELYKVGSLEGFGTFARAELSAMGALIDYLDITQKGKLPLLQPPVQEAEDRVMQIDAATRRNLELTRSLSGERGGSLLSVIDRTVTPGGARLLEQRLGSPSRNLDVIHARLSALDFCIDHSTLAADLRAALRKTPDLDRALSRLALDRGGPRDLAAIRNGLGQAEAIAALCDGLELPGLIAGACADLNGFDELLGLLDTALVAEPPLLARDGGFIAPGYDSDLDEARELRDKGRGVIAGMQQKYAEHTGIASLKIKHNNVLGYFIETTATHAAKMLNPPLSETYIHRQTTANQVRFTTVELSELETRILNAGNHALEIEKRLYSSLSGAVLEQAARLNIAARGLAELDLATALADLARAENWCRPSVDPSRAFAIEGGRHPVVEHALRRQGGDPFVANDCDLSADKGAAIRLLTGPNMAGKSTYLRQNALITLLAQIGSYVPADSAHIGVVSQLFSRVGASDDLARGRSTFMVEMVETAAILNQADDHALVILDEIGRGTATYDGLSIAWATLEHLHATNRCRALFATHYHELTALAATLDGVENLTVAVKEWEGEVIFLHEVRKGAADRSYGVQVAQLAGLPPSVVARARVVLDQLEKSEREGGKQKALIDDLPLFSAAPPLPPPAPKTSPADAMLKEIHPDELTPRQALEMLYKLKEAAR

SEQ ID NO: 4256 - DNA, 2640 bp, Silicibacter sp
  CDS (1)..(2640): transl_table=11
atgtctgtcacgccgatgatggcgcaatatctcgagatcaaggcgcaatacccggatgcgctcctgttttatcgcatgggcgatttctacgagatgttctttgaggatgcggtcaacgcggccgaggcgcttgatatcgcgctcacaaaacggggcaaacacgaaggcgaggatattcccatgtgcggcgttcccgtgcatgccgccgaagggtatcttttgaccctgatccgcaaagggtttcgcgttgccgtgggcgagcagcttgaaagccccgcagaagccaagaaacgtggttccaaatccgttgtgaaacgtgacgtggtacgcctggtgacgcccggcacgcttaccgaggattccctgctcgaagcgcgtcgccataacttcctggtggcctattccgaactgcgtgaccaggccgccctggcttgggccgatatatcaaccggcgcgtttcacgtcatgcccgtcgcccgcgtgcgtctcagtccagagcttgctcgtcttgccccatcagagctgatcgttgcagatggccccatctttgacgccacattgcctttggcagaggagtacaaaatcccgctcacgcctcttgggaaggcaagctttgacagtaccgctgcagaaaaacgtctctgccatctgttcaatgtgagcgcgctcgatggttttggcaccttcaacagggccgaaatctcggccatgggcgctgtcgtggactatctggagatcacgcagaaaggcaaactgcccctgttgcagcctccactccaggaatccgaggatcggacagtccagatcgacgcctcaacccggcgtaacctcgaactcacccgctcgctatctggcggacgtgctggatctcttttgtctgttgtggatcgcaccgtcactccgggcggcgcccgactgctcgaacaacgcctttccagcccctctcgcaatctcgacgtgatttccgcgcgcctcgaggctctggatacgatcgtcgaagaccccattcgctgtgatacgttgcgtggccttctccgcaaaacacctgatatcgaccgcgcgctttcgcgccttgcgcttgatcggggcggaccacgcgacctcgctgccattcgcaacgccctgagccaaggcgaagacatcgaacgggcactacaggatccggatctgccgaccctgctgcgcgatgcggcacactccctcgaagggttccaagatctgctctccctcctcgatgccgccttgatcgccgagccccccctgctggcccgtgatggcggctttatcgcagcaggctatgatcgcgaactcgatgaagcgcgcaccctcagagatgagggccgctctgtcatcgcaggtctgcagaaaaaatatgcagagcatacgggaatcagctcactcaagatcaagcacaacaatgtgcttggctatttcattgaaaccacatcgacgcacgccgcaaagatgcagtcagcgccgatgtcagacacctatattcatcgtcaaaccaccgcaaaccaagtccgtttcacaaccgtggaactaagcgaaatcgagaccaagattctgaacgccggaaatctggcgcttgagatcgaaaaacggctctatcaaaggctttctggcgctattctagacagcgctgcgcggctcaatcaggccgcgcgcgggtttgccgagatcgatttggtcaccgcattggcagatcttgcacgcgcggaaaactggacccgaccgcgcgttgatacatctcgtgcgtttcacgtggacggcggacgtcatccggttgtggaacaagcgttgcgccatcaaggcggtgacagctttgtggcgaatgactgtgatctcagccctcaagacggagcagcgatctggcttctcaccgggcccaacatggccggtaaatcgaccttcttgcgtcagaacgccctgattgccgtgcttgctcaaatgggcagctatgtccccgcagaagcagctcatatcggcatgatcagccagttgttcagccgcgttggcgcatcagacgatctcgcgcgtggacgctcgacctttatggtggaaatggtagagaccgctgccattctgaatcaggccgatgatcgcgcactggtgatccttgatgaaatcgggcgtggcacggcaacctacgatggcctatcgatcgcctgggcgacgctcgaacatctgcatgaggtcaaccgctcccgggcgctctttgcaacgcactatcacgaattgacgcaactcgcgacaaaactcaccggtgtcgagaatgcaaccgtctcggtcaaagagtgggaaggcgaagtcatcttcctgcatgaggtcaaaaagggcgcagcggatcgttcctatggtgtgcaggtggcacagcttgccggtctacctgcctcggtcgtggcacgggcgcgcagcgtcctcgatatgctggagaaaagcagccgcgaaggtggcggtgccggaaaggtacaaatcgatgacctgccgttgtttgcagccgcgccagcgccgcagcccaaacccgcccaaggcccctcgccggtagaaaagctcctcgaagagatctttcccgatgacctcaccccacgtgaagcactcgaaacactctatcggctcaaggacgtaagcaagggttaa

SEQ ID NO: 4257 - protein, 879 aa, Silicibacter sp
MSVTPMMAQYLEIKAQYPDALLFYRMGDFYEMFFEDAVNAAEALDIALTKRGKHEGEDIPMCGVPVHAAEGYLLTLIRKGFRVAVGEQLESPAEAKKRGSKSVVKRDVVRLVTPGTLTEDSLLEARRHNFLVAYSELRDQAALAWADISTGAFHVMPVARVRLSPELARLAPSELIVADGPIFDATLPLAEEYKIPLTPLGKASFDSTAAEKRLCHLFNVSALDGFGTFNRAEISAMGAVVDYLEITQKGKLPLLQPPLQESEDRTVQIDASTRRNLELTRSLSGGRAGSLLSVVDRTVTPGGARLLEQRLSSPSRNLDVISARLEALDTIVEDPIRCDTLRGLLRKTPDIDRALSRLALDRGGPRDLAAIRNALSQGEDIERALQDPDLPTLLRDAAHSLEGFQDLLSLLDAALIAEPPLLARDGGFIAAGYDRELDEARTLRDEGRSVIAGLQKKYAEHTGISSLKIKHNNVLGYFIETTSTHAAKMQSAPMSDTYIHRQTTANQVRFTTVELSEIETKILNAGNLALEIEKRLYQRLSGAILDSAARLNQAARGFAEIDLVTALADLARAENWTRPRVDTSRAFHVDGGRHPVVEQALRHQGGDSFVANDCDLSPQDGAAIWLLTGPNMAGKSTFLRQNALIAVLAQMGSYVPAEAAHIGMISQLFSRVGASDDLARGRSTFMVEMVETAAILNQADDRALVILDEIGRGTATYDGLSIAWATLEHLHEVNRSRALFATHYHELTQLATKLTGVENATVSVKEWEGEVIFLHEVKKGAADRSYGVQVAQLAGLPASVVARARSVLDMLEKSSREGGGAGKVQIDDLPLFAAAPAPQPKPAQGPSPVEKLLEEIFPDDLTPREALETLYRLKDVSKG

SEQ ID NO: 4258 - DNA, 2619 bp, Staphylococcus aureus
  CDS (1)..(2619): transl_table=11
atgtctaatgttacaccaatgatgcagcaatatttaaaaataaaatcagaataccaagattgcttattattttttagactaggtgatttctatgaaatgttttatgaagatgccaaggaggcatcacgtgtacttgaaattactttaactaaaagagatgctaaaaaagaaaatccaattccgatgtgtggtgttccgtatcattctgcagatagttatatagatacacttgttaataatggatataaagtagctatttgtgaacagatggaagatccgaaacaaacgaaaggtatggttagacgtgaggtagtaagaattgtgactccaggaactgtgatggagcaaggtggtgtagatgataaacaaaataactatattttaagttttgttatgaatcaacctgaaattgcgcttagttactgtgatgtttctactggcgaattaaaggttacacattttaatgatgaagcgactttattaaatgaaattacgacgataaaccctaacgaagttgttatcaatgacaatatttccgataatttaaaaagacaaattaatatggtgacagaaacaataacagtcagggaaacgttatcatcagaaatctatagtgtgaatcaaactgaacataaattaatgtatcaagcgacacaattattgctagattatattcatcatacacaaaagcgtgatttatcgcatatcgaggatgttgttcaatatgcagctatagattatatgaaaatggatttttatgctaagagaaaccttgagttaacggaaagcattcgattaaaatcaaaaaaaggaacgctactttggctaatggacgaaacgaaaacaccaatgggagcacgccgcttaaaacaatggatagatagaccactaataagtaaagaacaaattgaagcacgattagatatcgttgatgaatttagtgctcatttcatagaaagagacaccttaagaacatatcttaatcaagtgtatgatattgaacgtcttgttgggcgtgttagttacggaaatgttaatgcgagagatttaattcaacttaaacattccatttctgaaataccgaatattaaagcattactaaattctatgaatcagaatactcttgtacaagttaatcaactagaaccccttgatgatttacttgatatattagaacagagtttagtagaagaaccaccaatttcagttaaagatggcggactattcaaagttggttttaatacgcaattagatgaatatcttgaagcttcaaaaaacggaaaaacatggttagcagaattacaagccaaagaaagacaacgtacaggaataaaatcattgaaaataagctttaataaagtgtttggttattttatagaaataacacgtgccaacttgcaaaattttgaaccaagtgaatttggttatatgaggaagcaaacgttatcgaatgctgaacgttttataactgatgaacttaaagaaaaagaagatatcattttaggtgcggaagacaaagccatcgaattagaatatcaattatttgttcagctacgtgaagaagttaaaaaatatactgaacgtttacaacaacaagctaaaattatttcagagctagattgtttacagagctttgcagaaattgctcaaaaatataattacactaggccttcatttagtgaaaataaaacattagaattagtggaatctaggcacccagtagtggaaagagtaatggattataatgactatgtgcctaataattgtcgattagataatgaaacatttatatatttaattacaggtccgaatatgtctggtaaatcgacatatatgagacaagttgccataattagtataatggcccaaatgggagcttatgtcccttgtaaagaggcagtgttacctatatttgatcaaatattcactagaataggtgcggcagatgatttggtttcaggtaagagtacgtttatggtagaaatgctagaagcacaaaaggcattaacttatgcaacagaggatagtttgattattttcgatgaaattggacgtggtacttcaacgtatgacggtttagctttagcgcaggcaatgatagagtatgtagctgaaacatcacatgctaaaacgttattttcaacacattatcatgaattgacaacattagatcaagcattaccaagtctaaaaaatgttcacgtcgctgctaatgaatataaaggtgaacttatattcttgcataaagtcaaagatggtgcagttgacgatagttatggtattcaagttgcgaaattagctgatttacctgaaaaagttattagcagagcacaagtgattctaagcgagtttgaagcgtctgctggtaaaaaatcatcgatatcaaatttaaaaatggtcgaaaatgaacctgaaattaatcaagaaaatttaaacttaagtgttgaagaaacaactgatactttatctcaaaaagactttgaacaagcatcatttgatttgtttgaaaatgatcaaaaaagcgagattgaactacaaattaaaaatttgaatttatctaatatgacaccaattgaggcattggtgaagttaagtgaattacaaaatcaattaaaatag

SEQ ID NO: 4259 - protein, 872 aa, Staphylococcus aureus
MSNVTPMMQQYLKIKSEYQDCLLFFRLGDFYEMFYEDAKEASRVLEITLTKRDAKKENPIPMCGVPYHSADSYIDTLVNNGYKVAICEQMEDPKQTKGMVRREVVRIVTPGTVMEQGGVDDKQNNYILSFVMNQPEIALSYCDVSTGELKVTHFNDEATLLNEITTINPNEVVINDNISDNLKRQINMVTETITVRETLSSEIYSVNQTEHKLMYQATQLLLDYIHHTQKRDLSHIEDVVQYAAIDYMKMDFYAKRNLELTESIRLKSKKGTLLWLMDETKTPMGARRLKQWIDRPLISKEQIEARLDIVDEFSAHFIERDTLRTYLNQVYDIERLVGRVSYGNVNARDLIQLKHSISEIPNIKALLNSMNQNTLVQVNQLEPLDDLLDILEQSLVEEPPISVKDGGLFKVGFNTQLDEYLEASKNGKTWLAELQAKERQRTGIKSLKISFNKVFGYFIEITRANLQNFEPSEFGYMRKQTLSNAERFITDELKEKEDIILGAEDKAIELEYQLFVQLREEVKKYTERLQQQAKIISELDCLQSFAEIAQKYNYTRPSFSENKTLELVESRHPVVERVMDYNDYVPNNCRLDNETFIYLITGPNMSGKSTYMRQVAIISIMAQMGAYVPCKEAVLPIFDQIFTRIGAADDLVSGKSTFMVEMLEAQKALTYATEDSLIIFDEIGRGTSTYDGLALAQAMIEYVAETSHAKTLFSTHYHELTTLDQALPSLKNVHVAANEYKGELIFLHKVKDGAVDDSYGIQVAKLADLPEKVISRAQVILSEFEASAGKKSSISNLKMVENEPEINQENLNLSVEETTDTLSQKDFEQASFDLFENDQKSEIELQIKNLNLSNMTPIEALVKLSELQNQLK

SEQ ID NO: 4260 - DNA, 2544 bp, Streptococcus gordonii
  CDS (1)..(2544): transl_table=11
atggcaacagaaaaaatatcgccaggtatgcagcagtacttggatattaaaaaagactatcaggacgccttcctgctgtttcgtatgggtgatttctatgagttgttttacgaggatgctgttaatgcggcacagattctcgagattgccctgactagccgtaataagaattcagaaaatcccattccaatggcgggtgtaccttatcactctgcccagcaatatattgatgttttgattgagtctggttataaggttgccattgcagagcagatggaagatcctaaacaggccgtgggagtggtcaaacgcgaggtggtccaggttattacgccgggtacggtagtggattctagtaagccagtcggagaaaataactttttggttgctttggataggcaggagcaagcttatggcttggcctatatggatctggctacgggagaatttcaggtaaccagcctggcagactttgaccaagcttgtggagaaattcgaaatctccgagctcgggaagtagtcgtaggttattgcttgtcagaagatgagcagcagattttgtcaaaacaaatgaatttactcctgtcagaagtcgaggaagcaatggaggacgttcagcttttaggagatgagttgtcatctttagaaaagcagacggcagggaagcttctggcctatgtttttcagacacagatgcgggagctcagccatctcaagaaggtccatcattatgagataaaagattttctgcagatggattatgcgacaaagaccagcctagacttgactgaaaatgcccgtacaggtaagaagcatggtagtcttttttggctcatggatgaaacaaaaacggccatgggaggacgcctacttcgttcttggatccagcatcccttgattgataagggacgaattatcaagcgtcaagatgttgttcaggtctttctggattatttctttgagcggagtgatttggcagatagtctcaagggcgtctatgatattgaacgcctggtaagtcgtgtgtcatttggcaagaccaatcccaaggaccttctacaattggcttctactttaagccatgttcctcagatccggtcaattttagaaacgattgaaagcccagctctggagagtttggtggcaaggctagatgcgattcctgagctggaaaatctaatcagctctgcgattgacccagatgctccacaagtaattactgagggcaatatcattcgaactggttttgacgagactttggaccagtaccgtttggtcatgagagaggggactagctggattgcggacattgaagccaaggagcgagaggcaagtggtattactaatctgaaaattgattataacaagaaggatggctactatttccatgtaaccaattctcaactcggcaatgtccctagccattttttccgaaaagcaaccttgaaaaattctgagcgttttggtacggaagagctggcgcgcattgaaggcgagatgttggaggcgcgtgagaagtctgctaatctggaatatgagatcttcatgcgcattcgtgaagaggtcggaaaatatattcaacggctacaagccttagctcaaaccctagctacggtcgatgttttacagagctttgcggttgtggctgaaagtcaacacttagtccgtccaagttttacaagcagtcgtagtttgcagattaaaaaaggccgtcatgcggttgtcgaaaaagtcatgggagcccaaagctacatcccaaatagtatcgaactggatcaagaaacagatattcagctgattactggaccaaatatgagcgggaagtcaacctacatgcgacagctggcaatgattgtcatcatggctcaaatgggatcgtatgtaccagcagaagtagccagtcttccgattttcgatgctatctttacacgaataggtgcggcagatgatttggtgtctggtcaatcgacctttatggtggagatgatggaggccaatcgggccattcgacaagcaagtgaacgctctttgatcctttttgatgaactggggcgggggactgcgacttatgatgggatggctctggcacaagcaattattgagtatattcatgatcgtaccaaggccaagactctttttgcaacccattatcatgagttgacagacctgtcaagtagcttgacacgattagaaaacgtccatgtggcaactctagaaaaagatggccaagtgacatttttacataagattgaagcaggacctgctgacaagtcctatgggattcatgttgcaaaaattgctggcttacctacggatttgttaaggcgagcagatgcgattttgacagatttggaaaatcaagagaaaagagaggcttctcttccagcgtctagaacggactcccaaaaagtgtctgagcagatgtcgctttttgtagaagaaacggaaaatccagtcctgactgaactacgagacttggacatctacaatatgactcccctggaagtcatggcagccgtggccgagctcaagaagaagttgtga

SEQ ID NO: 4261 - protein, 847 aa, Streptococcus gordonii
MATEKISPGMQQYLDIKKDYQDAFLLFRMGDFYELFYEDAVNAAQILEIALTSRNKNSENPIPMAGVPYHSAQQYIDVLIESGYKVAIAEQMEDPKQAVGVVKREVVQVITPGTVVDSSKPVGENNFLVALDRQEQAYGLAYMDLATGEFQVTSLADFDQACGEIRNLRAREVVVGYCLSEDEQQILSKQMNLLLSEVEEAMEDVQLLGDELSSLEKQTAGKLLAYVFQTQMRELSHLKKVHHYEIKDFLQMDYATKTSLDLTENARTGKKHGSLFWLMDETKTAMGGRLLRSWIQHPLIDKGRIIKRQDVVQVFLDYFFERSDLADSLKGVYDIERLVSRVSFGKTNPKDLLQLASTLSHVPQIRSILETIESPALESLVARLDAIPELENLISSAIDPDAPQVITEGNIIRTGFDETLDQYRLVMREGTSWIADIEAKEREASGITNLKIDYNKKDGYYFHVTNSQLGNVPSHFFRKATLKNSERFGTEELARIEGEMLEAREKSANLEYEIFMRIREEVGKYIQRLQALAQTLATVDVLQSFAVVAESQHLVRPSFTSSRSLQIKKGRHAVVEKVMGAQSYIPNSIELDQETDIQLITGPNMSGKSTYMRQLAMIVIMAQMGSYVPAEVASLPIFDAIFTRIGAADDLVSGQSTFMVEMMEANRAIRQASERSLILFDELGRGTATYDGMALAQAIIEYIHDRTKAKTLFATHYHELTDLSSSLTRLENVHVATLEKDGQVTFLHKIEAGPADKSYGIHVAKIAGLPTDLLRRADAILTDLENQEKREASLPASRTDSQKVSEQMSLFVEETENPVLTELRDLDIYNMTPLEVMAAVAELKKKL

SEQ ID NO: 4262 - DNA, 2643 bp, Syntrophus aciditrophicus
  CDS (1)..(2643): transl_table=11
ttgggaatgaaagaatccatggaaataagcagtttgaccccggcgatgaagcagtatgcggaagtcaaggctctgcacaaggactgcattgtccttttccgcatgggggatttttatgaaatcttttttgaagacgccgtaaccgcatccaaaattctggatatcacccttacatcaagaaacaagggaaaggaggacagcatccccctttgcggctttccataccatgcatcgtctacttacattccaaagctgattgaaaagggattcaaggtagcggtctgtgaacagattgaagatccgaaactggccaaaggcgttgtcaggcgggaggtcgttcggatcgtcaccccggggctggttgtcgacacagcaaatcttcatgccaaggaaaataactttctggcggcggttttccctttggagcatcatatcgggttggcctttctggatatttcaacaggggaattccgggtcagtgattttcaggatatccggttttttgaaacggagcttgcagccttggattttcgagagatcatggttccacagggaagcgggaagcaaggttttttaaaagcttttgccggcagggaaaattcctgccgccttgatgaatttcccgatgaatatttcgatcgggaatcggccctgggccgcctgcaggactatatccggaaagaggacctggaagatctggggctgaaagactgccccgcggttatcggggcggcgggcgccgtcctgcgctatgtggaggaaacccagaaaagccggctgacacacatcaatcggctgcaatggtactcggcggctgaatacctcgttctcgatgaaacggcgaagcggaacctcgaacttttcaaaacgattcaggataaccggactgccggttccctgttttctgttctcgatgaaaccgtgacggccatgggagggcgccgcctccgctggtggctgaactacccccttgtcgatccggagaaaattaaggcaaggctggctgccgttgcggaaatccgtgaaaatcacctgtttcgcgaaaatctgcgaaaagttctttccgaggtttacgacatggaacgcctggcgggacggattgccctgggagttgccaacggtcgtgatctgattgctttgaaacagtctctgaaaaatctcccggttctgaaaaacctccttgccgacagcaattcgttcatgctggacagaattcaagacggcattgacgaattgcccgatctttacgatctcattgaaaaagcgatttgcgattctcctccggtcacgcttcgagaaggggggatcattaaggaaggatatgacgaggaaagggatcggctgttcttcatgacgcgggacggccggcgctggatcgcggccctcgaggagaaggaaagaaaaagaacgggcatttcatcgctcaaggtgggttttaacaacgtcttcgggtattacatcgagatctccaaggccaactctgccctggctccggaagattacgtgagaaagcagaccctcgtcaacgcggaacgctacattaatcaggaactcaaggaatacgaggcgaccgtgctcaacgcggagacgcgatgccgggagcgggaatatgacctgttcatgcaggtaagggaatgcgcggcggcggaaattactcgaatgcaggcgacggcgacgctgctggctgatcttgatgcgctggcctcgctggctgaagtagctgaaaagtataattactgctgtccagttgtggacctggaagatcggatcgagattgacgtggggcgccatcccgttgtcgaacggatgtccctcagggacggcttcgttcccaatgacgtggttctggacacggacgaaaaccggttcctggtgattacgggtccgaacatggcggggaaatccacctacatccgccaggtggccctgatcgttctaatggcccagatggggagtttcgtgccgtcatcacgggcgcggatcggggtcgtggatcgcatcttcacgcggatcggagccgcggacagcctgatccgggggcagagcaccttcatggtggaaatgaatgaggtggcccagatcctctgtcatgccaccggccgaagcctggtcatactggatgaggtgggaaggggaaccagcacgtttgacgggctcagcattgcctgggcggtggcggaatatctccatgacaaaaactggatcggggcgcggaccctgtttgcgacacactatcatcagcttaccgaattggccgtcgcgggaacgggatacaggaattacaatatcgcggtcaaggaatggggtgaccgaatcatcttcctcagaaagattgttcccggaggaacaaaccggagttacgggattcaggttgcccgcatcgccggagttccggaagaggtcattgtccgcgccagagagatcctcgacaatctggaaaaaggggaaatggatgaggtgggcatgcccaggattgcccggagcagaaaaagaaaaccccgcaacccgggacagttgaatctcttcatgagcgagcgggaacgcgtcatcgaagagcttgcggcgttgaacatttcccgcgtggagccgcatgatgccctcaacatgatgctgaactggcaggaaaggcttaaagaaggctga

SEQ ID NO: 4263 - protein, 880 aa, Syntrophus aciditrophicus
MGMKESMEISSLTPAMKQYAEVKALHKDCIVLFRMGDFYEIFFEDAVTASKILDITLTSRNKGKEDSIPLCGFPYHASSTYIPKLIEKGFKVAVCEQIEDPKLAKGVVRREVVRIVTPGLVVDTANLHAKENNFLAAVFPLEHHIGLAFLDISTGEFRVSDFQDIRFFETELAALDFREIMVPQGSGKQGFLKAFAGRENSCRLDEFPDEYFDRESALGRLQDYIRKEDLEDLGLKDCPAVIGAAGAVLRYVEETQKSRLTHINRLQWYSAAEYLVLDETAKRNLELFKTIQDNRTAGSLFSVLDETVTAMGGRRLRWWLNYPLVDPEKIKARLAAVAEIRENHLFRENLRKVLSEVYDMERLAGRIALGVANGRDLIALKQSLKNLPVLKNLLADSNSFMLDRIQDGIDELPDLYDLIEKAICDSPPVTLREGGIIKEGYDEERDRLFFMTRDGRRWIAALEEKERKRTGISSLKVGFNNVFGYYIEISKANSALAPEDYVRKQTLVNAERYINQELKEYEATVLNAETRCREREYDLFMQVRECAAAEITRMQATATLLADLDALASLAEVAEKYNYCCPVVDLEDRIEIDVGRHPVVERMSLRDGFVPNDVVLDTDENRFLVITGPNMAGKSTYIRQVALIVLMAQMGSFVPSSRARIGVVDRIFTRIGAADSLIRGQSTFMVEMNEVAQILCHATGRSLVILDEVGRGTSTFDGLSIAWAVAEYLHDKNWIGARTLFATHYHQLTELAVAGTGYRNYNIAVKEWGDRIIFLRKIVPGGTNRSYGIQVARIAGVPEEVIVRAREILDNLEKGEMDEVGMPRIARSRKRKPRNPGQLNLFMSERERVIEELAALNISRVEPHDALNMMLNWQERLKEG

SEQ ID NO: 4264 - DNA, 2649 bp, Synechococcus sp
  CDS (1)..(2649): transl_table=11
atgacaacttctgagcttccggagcatttggctaagcacgaggtgcgctatgccgatcaccgtcaggtggagcgcgatcgcctgacgccgatgatgcagcactacgccgaggtcaaggatcagcatctgcagcagatcctgctctatcggatgggcgactttttcgagtgcttctttcaggatgcgatcgtggttgcccgcgagctagagctggtgttgaccagcaaggaagcagggaaagaagtcgggcgtgtgccgatggcgggcattccctatcacgccctcgatcgctatgccagccagttagttgagaagggttacgcgatcgcgatctgcgatcaggtagaaacggctgctcaggcgcaagggccgctcgtccgccgcgaaatcacgcggatcatcacaccgggcaccatcctcgaagagggaatgctgcaggcacgccgcaataactttttggcagcggtcgtgatcgccggcgagcattgggggctggcctacgcagatagctccactggtgactattggacgagccaaagtactggtctggagggactgacccaggagctctatcgcctgcaaccctcagaagtgctctttcccagtgccgcaccggatttagccggattgctgcggccggggcagtccaagccgcaacagattcccgactgcttgccggattcgttttgctacgccctgcgatcgcccatgccctttgaattgcatgaggcacggcagcggttgctggaacatttccaactgcgatcgctggaaggctgtggctgtgagcaattacccttggcgatccgtgctgctggtggtctcctggactacttgggagaaacccagcgggaaagccttgcgccattacaaaagccgcgtacctattcgctgtcggagtttttaatcctcgatcaacaaacccgccgcaatttagagatcactcaaactcagcgggatggcagcttccacggctcgctgctctgggcgctcgatcgcacgatgactagcatgggtggccgcctgttgcgccgctggttgctgcaacccttgctcaaccctgaggcgattcgcaaccgccaagccgcgattcaagaactctgtcaggatgggcgacttcggcaggatctgcgatcgctactccagaagatctacgaccttgagcggctctcaggccgcgctggtgctgggacggccaatgcccgcgatctcttggcgctggcggagtcgttgctacgcctaccggagctggcccagttactcagtcgtgcccaatcacccttgctggcgcaattacagcaggtgccaccggaactggagcagttgggcgatcgcctccagcagcatttagtcgaatcgccccccttacaactgactgaaggcgggttgattcgatccggggttgcgatcgccttggatgagttgcggcaacaagtcgagagcgatcgccagtggattgccagcctcgaagccagcgagcgtactgcgactggcatcaacagcctcaaggtgggttacagcaaaaccttcggctatttcattagcctgagtcgtagcaaagccgatcaggtgcccgatcactacatccgccgccaaaccctgaccaacgaagagcgctttattacaccggatctaaaggagcgggaaagccgaatcctcaatgctcagacggatctcaatcaactggaatacgacctttttgttgggctgcgcagcgaagtcagtcaccatgtcgaaacaatccgcgcgatcgccacagcagtcgctgccgctgatgtcttagcagctttagcggaggtagcagtctaccaaaactattgctgccctgagattcgtgacgatcgccagttggcgattcaggatggtcgccacccagtcgttgagcaggctttgccgagcggcttttatgtacccaatagttgcggcctcggtagcgatcgcggcccagatctaattgttttgaccgggccgaatgccagcggcaaaagttgttatttacgacaggttggcctcattcaactgctggctcaaattggtagttttgttcccgcgaagaatgcccaagttggaatttgcgatcgcatcttcacccgcgttggagccgtcgatgatctggcaactggccaatcaactttcatggtggagatggacgaaacggctaacatcctcaaccatgccaccgcgcgatcgctggtcttgctggatgagattggtcgcggtaccgccacctttgatggcctctcgatcgcctgggctgtggcggaatatctagcaagggaaatccaagcccgcacgatttttgcaacgcactaccacgagctgaatgagctgtcaggcctgctcaagaacgtcgccaacttccaagtcaccgttaaagaactgcccgatcgcattgtcttcctgcatcaagttcagccggggggcgccgatcgttcctatggcattgaagcagcgcggctcgcaggtttacccagcgaggtgatcgatcgcgcccgtgaagtgatgagccgcattgaaaaacacagccgcattgctgtggggttacggcgtggcaatggtagccagcgtcggactcaggcgtcgccccagcagatagatgccacgatcgctactgaacaattgggcctcttcagtggtccttcgcactaa

SEQ ID NO: 4265 - protein, 882 aa, Synechococcus sp
MTTSELPEHLAKHEVRYADHRQVERDRLTPMMQHYAEVKDQHLQQILLYRMGDFFECFFQDAIVVARELELVLTSKEAGKEVGRVPMAGIPYHALDRYASQLVEKGYAIAICDQVETAAQAQGPLVRREITRIITPGTILEEGMLQARRNNFLAAVVIAGEHWGLAYADSSTGDYWTSQSTGLEGLTQELYRLQPSEVLFPSAAPDLAGLLRPGQSKPQQIPDCLPDSFCYALRSPMPFELHEARQRLLEHFQLRSLEGCGCEQLPLAIRAAGGLLDYLGETQRESLAPLQKPRTYSLSEFLILDQQTRRNLEITQTQRDGSFHGSLLWALDRTMTSMGGRLLRRWLLQPLLNPEAIRNRQAAIQELCQDGRLRQDLRSLLQKIYDLERLSGRAGAGTANARDLLALAESLLRLPELAQLLSRAQSPLLAQLQQVPPELEQLGDRLQQHLVESPPLQLTEGGLIRSGVAIALDELRQQVESDRQWIASLEASERTATGINSLKVGYSKTFGYFISLSRSKADQVPDHYIRRQTLTNEERFITPDLKERESRILNAQTDLNQLEYDLFVGLRSEVSHHVETIRAIATAVAAADVLAALAEVAVYQNYCCPEIRDDRQLAIQDGRHPVVEQALPSGFYVPNSCGLGSDRGPDLIVLTGPNASGKSCYLRQVGLIQLLAQIGSFVPAKNAQVGICDRIFTRVGAVDDLATGQSTFMVEMDETANILNHATARSLVLLDEIGRGTATFDGLSIAWAVAEYLAREIQARTIFATHYHELNELSGLLKNVANFQVTVKELPDRIVFLHQVQPGGADRSYGIEAARLAGLPSEVIDRAREVMSRIEKHSRIAVGLRRGNGSQRRTQASPQQIDATIATEQLGLFSGPSH

SEQ ID NO: 4266 - DNA, 2610 bp, Thermoanaerobacter tengcongensis
  CDS (1)..(2610): transl_table=11
gtgctaaaaatgtctgtaactccaatgatggaacagtaccttaaaataaaggaaaaatataaggatgcgatactttttttccgccttggtgacttttatgagatgttttacgaagatgcagaaattgcagcaaaagaacttgaaattgctttaactggcagagatgcaggaacagaagaaagggctcccatggcaggagttccatatcatgcagcagatttctacattgataagcttgtaaaaaagggatataaagtcgccatatgtgagcaattagaagacccatcaaaagcaaaaggcttggtaaaaagagatgtggtgcgaatatacactccagggactataataaatcctgagtccatggatgaaaaatctaacaattatctagtttctgtatatagagaaaaagacaattacggtatttgtgctgttgatgtgacaacaggagagctttatgctacagaaattaaaaactgtaaaaacgggaagagaatatacgatgaaatagccaaatacagtccttctgagataatttccaatgaagaatttttaaaaaacaataaatacataaaagtatttaaaaacaacaactgtgctgtcaatgcctataagcctttaaactatgaggcaagttctgagctcattgaaaagcaatttgacaaaaaagtagaagagttagagcttgaggataaaaaatttgtaattcattcccttggagccttactttcgtatctaaaagagcttcaaaaaacttctttaaaacacataaataaattgactttataccaggataattcctatatgggccttgacagtaacgcaatacgcaatctggaaattctggagtctaacagaaacaagtcaaaaaaaggttctctcttaggagtgttggatagaactgttactcctatgggaggcaggcttctaaaaaaatggctagaagagcctttaatcgacaaagatgagatagaaaaaaggcttgatgcagtagaagaacttttcaacaattacagagagagaattgagttgaaagaactcctcaataaagtatacgatctagaaaggctagcgagcaaaatagtgtatcaaagtgttacgcctaaagatttcatttctataaagctttctttacaaaacttgccaaagataaagaatattttatcaaaattttcttccaggcttttaaaagaaatttatgaaaaattagatgttttgcaagacgtatatgaacttatagataaatctataaaagacgacccttccaatcagttgaaagagggaaatatcataaaagacggatacaatgaaatggtagataaattgagaaaggcctcaactgaaggtaaaaactggattgcaaatttagaggctgatgagagggaaaagacaggaattaaaaacttgaggataggctataataaggtattcgggtattacattgaagttacaaagtcaaacattcctcaggtaccagataggtatatcagaaaacaaacactggctaatgcagaaaggtatgtgacgccagagcttaaggaaattgaagagacaatactgggagcggaggaaaagctaattgagctggaatatgagcttttcaatgaaataagagaaaaagtagaacttcagatagtgagaattcaaaacactgcaaaatacatagctataatagatgttttaatatctttcgcagaagtagctgaaacaaataaatacgtgaagccgattgtggattatgaagacaggattgtcataaaggaaggccgtcatcctgtcgttgagacgatttctgatgaaggatttgtggcaaacgacatagacatagggccagaaaacccaatcatgataataacaggccctaatatggcaggtaagtctacttacatgagacaggtagctcttatagttctcatggctcaagttgggtgctttgtaccggcttcctacgctaggatagggatagtagacaagatatttacaagagtaggggcttctgatgacatctttgctggccagagcacatttatggtagaaatgtctgaggtggcaaacatacttcattctgctacaagtaaaagcctgattattttggacgaggttggaagaggtactagcacttacgatgggatgagcattgcacaggctgtgattgagtatatccatgaaaagataaaggccaaaactttgtttgctacccactaccatgagcttaccaagttagaaggcaagttaagaggagtgagaaattttaatgtatcagtagaggaaagggaagatgacataatatttcttcacaaaatagtcccaggcggttcagatagaagttatgggatacaggtttcgaaattagcagggctaccttacagcataattgaaagagctaaagaaatccttgaagctttagaaagggataaagcagtcaaaaacgagttagaagaggcagtctctcagtttgcttttactcagatagacatattttcttctgctaaagatgctctgatagaagagattgcaaattgcgatcctgacaatatgactcctcttcaggcattgacttatctttataagctgaaagagaaggctgcctcattaaggagcggagtgatatga

SEQ ID NO: 4267 - protein, 869 aa, Thermoanaerobacter tengcongensis
MLKMSVTPMMEQYLKIKEKYKDAILFFRLGDFYEMFYEDAEIAAKELEIALTGRDAGTEERAPMAGVPYHAADFYIDKLVKKGYKVAICEQLEDPSKAKGLVKRDVVRIYTPGTIINPESMDEKSNNYLVSVYREKDNYGICAVDVTTGELYATEIKNCKNGKRIYDEIAKYSPSEIISNEEFLKNNKYIKVFKNNNCAVNAYKPLNYEASSELIEKQFDKKVEELELEDKKFVIHSLGALLSYLKELQKTSLKHINKLTLYQDNSYMGLDSNAIRNLEILESNRNKSKKGSLLGVLDRTVTPMGGRLLKKWLEEPLIDKDEIEKRLDAVEELFNNYRERIELKELLNKVYDLERLASKIVYQSVTPKDFISIKLSLQNLPKIKNILSKFSSRLLKEIYEKLDVLQDVYELIDKSIKDDPSNQLKEGNIIKDGYNEMVDKLRKASTEGKNWIANLEADEREKTGIKNLRIGYNKVFGYYIEVTKSNIPQVPDRYIRKQTLANAERYVTPELKEIEETILGAEEKLIELEYELFNEIREKVELQIVRIQNTAKYIAIIDVLISFAEVAETNKYVKPIVDYEDRIVIKEGRHPVVETISDEGFVANDIDIGPENPIMIITGPNMAGKSTYMRQVALIVLMAQVGCFVPASYARIGIVDKIFTRVGASDDIFAGQSTFMVEMSEVANILHSATSKSLIILDEVGRGTSTYDGMSIAQAVIEYIHEKIKAKTLFATHYHELTKLEGKLRGVRNFNVSVEEREDDIIFLHKIVPGGSDRSYGIQVSKLAGLPYSIIERAKEILEALERDKAVKNELEEAVSQFAFTQIDIFSSAKDALIEEIANCDPDNMTPLQALTYLYKLKEKAASLRSGVI

SEQ ID NO: 4268 - DNA, 2703 bp, Treponema pallidum
  CDS (1)..(2703): transl_table=11
gtgaggtccctcgcgtcagatacccctctcatgcgtcagtaccacgccattcgggcacagcatccggatgcggtcctgttctttcgcttgggcgatttctacgaaatgttcgattccgacgcgctccacgtgagtaccctcttggggctcacccttacaaaacgaaatggaacacccatgtgcggggtgcccgtccataccgcgcgcacgcacatagcacgcctgcttaagcacggtaaaaaagttgccttgtgcgagcaggtttctcatcctgtccccggagaactcacacagcgcaaggtaattgagattatctcccccgggaccgcagtggaagatgactttctcagtcagggattttcccaatacttagccaccgtctgtgcctcagacgccaccgtcgccttttcttacctagaagtcagcaccggcgccttcttcatcaccagctttccccgcgccgaagcagcggacgcattgcaaaaagagttcggacgtgtccagccgtctgaggttctcctgtctgcttcagtgctccgttcactgcctgaacttgccgctatcctcagtctctacccccggctcgttcgtaccaccggcgcagatgcgctttttaatcccgagcacactaaaaaccgcctgcaccattgctttcgcacacgcaacttggattgcctcaccctcctgccccattcgccagacctcgctgccgccggggcgctgattgcgtatttggaagaaaccacgcgacacccgctctcccacgtcagtgccatcacccgctaccatatccatgactttgtagaaatcgatgacgctacgcgcaaaaatctagagatacttcaaaatctccacgacagcacccatgcgcattctctttttgaaacactcaactatacacacaccgccatgggtaccaggctcctgcgctattggctgcaccaccccttgcgctcccaggaggaaattcaaaaacgcctcagtgcagtggtcttttttcatcaccgtccccacatcctcaagacactgcgtgcaacactctcgtgtgttcgggatgtggagcgcctagtcgcccgcgtggcgttagaaaaggcgcacggacgtgacttgctcgccttaaaagaaagtctcagggcaatccttaccttccgcagcctcgagcgcgaaagtccctttcccccagaccttcttccctcagaaggggataccccggtgctgcaggaactgtatggtcttttagaacagtctatcaaagaagattgccccgtaacgctaagcgatgggaaccttatcaagcgtggtttttctgcgtccttagatgaactgcaccgcgtgcgtgacaatgcaaatgaaattctaaaacaatatttggcagaggagcgtgagcgcacgggtatcggtacattaaaaatgaagtacaatcgcatgctcggtcactttctggaggtatccaaagggcatctttctgctgtccctgcgcactttattcgtcgccgttcactgagcaatgccgatcgctttaccaccgaacagttgtcagaattggaagcaaaacttgcccgcgcccgtgagggcctcgtttcctttgaacaagaactctttgcagatatccgccgtaccgtatgttctcatacccagctgctgcgcacgaacgctgcacgggtggcacagctggatgtgctccaatcttttgcgcacgctgcgctccagcatggctggagtcaaccggtctttatcaaagacggtgcacttcgtattacggggggcagacatccggtggtggaacttcatctcccctccggggagtttgtacccaatgatctgacactttcttcaagtgaacatgcggtgttgccgcgctttgcgctcatcaccggaccgaatatggcaggaaaaagtacttttttgcgtcagactgcgctcatttgcctgattgcgcaggttggctcctttgtccctgcagaaaaggcagagctcacccccgtcgatcgtattttttgtcgggtaggagcggccgataaccttgcgcgcggggaatctaccttcttggtagaaatgagtgaaacagcacacatcctgcgtgcagcaacccgcgacagccttgttatcatggacgaagtaggacggggaacggcaactgaagacggtttatccatagcgcaggcagtcagtgaatatttgttgcatcatgtgcgtgcaaaaacgctgtttgcaacacattaccatgaactgtcccgtcttgcccacccgcagttagaacacctcaagcttgatgttctagaaactgacaataccattgtatttctgaaaaaagtgacgcccggttcttgcggcagttcgtacggcatttacgttgcgcgtctggcggggctccctgaatcggtactggcacgcgcgtgtgagcttttgaaacaactgcagcagcgggcaggatctgctccacgtgcgtctgctgcgcacgaagcagatgcagtggctcaaacagaagcagtacacgcgcacaaggcagcgtctaaaccgtgcgcgcagcgtgtgtcggcagatctatttactcaagaagagttaataggcgcagagattgcatcgttgaatccagacgccattacaccgcttgaagcgctgacactcatcgcgcggtggaaacgcagcctccgcggttctgcaacgcagcagagcagcgccatgacaaaacggaaggggtaa

SEQ ID NO: 4269 - protein, 900 aa, Treponema pallidum
MRSLASDTPLMRQYHAIRAQHPDAVLFFRLGDFYEMFDSDALHVSTLLGLTLTKRNGTPMCGVPVHTARTHIARLLKHGKKVALCEQVSHPVPGELTQRKVIEIISPGTAVEDDFLSQGFSQYLATVCASDATVAFSYLEVSTGAFFITSFPRAEAADALQKEFGRVQPSEVLLSASVLRSLPELAAILSLYPRLVRTTGADALFNPEHTKNRLHHCFRTRNLDCLTLLPHSPDLAAAGALIAYLEETTRHPLSHVSAITRYHIHDFVEIDDATRKNLEILQNLHDSTHAHSLFETLNYTHTAMGTRLLRYWLHHPLRSQEEIQKRLSAVVFFHHRPHILKTLRATLSCVRDVERLVARVALEKAHGRDLLALKESLRAILTFRSLERESPFPPDLLPSEGDTPVLQELYGLLEQSIKEDCPVTLSDGNLIKRGFSASLDELHRVRDNANEILKQYLAEERERTGIGTLKMKYNRMLGHFLEVSKGHLSAVPAHFIRRRSLSNADRFTTEQLSELEAKLARAREGLVSFEQELFADIRRTVCSHTQLLRTNAARVAQLDVLQSFAHAALQHGWSQPVFIKDGALRITGGRHPVVELHLPSGEFVPNDLTLSSSEHAVLPRFALITGPNMAGKSTFLRQTALICLIAQVGSFVPAEKAELTPVDRIFCRVGAADNLARGESTFLVEMSETAHILRAATRDSLVIMDEVGRGTATEDGLSIAQAVSEYLLHHVRAKTLFATHYHELSRLAHPQLEHLKLDVLETDNTIVFLKKVTPGSCGSSYGIYVARLAGLPESVLARACELLKQLQQRAGSAPRASAAHEADAVAQTEAVHAHKAASKPCAQRVSADLFTQEELIGAEIASLNPDAITPLEALTLIARWKRSLRGSATQQSSAMTKRKG

SEQ ID NO: 4270 - DNA, 2706 bp, Trichodesmium erythraeum
  CDS (1)..(2706): transl_table=11
atgaaatattccgcatctacatctactccaaaatctgcacaacccaaagaagaggaactagaaaattctcttcctactaatgctgattatagtaaaattgacgttagcaaactgtcagaaatgatgcaacgttatgtggaagttaaacaacaatattctcatgctcttttactatttcgagtaggtgacttttttgagtgtttttttcaggatgctgttacgatcgcgcaagaattagaactagtacaaaccactaaacacgctggcaaagaaattggtagagtccccatgactggtgtacctcatcatgcggtagaaaaatatgctactttcttagtagaaaaaggttatgcggtggtcgtttgcgatcaagtagaagactctgctattgctaaaaaagaaaaccgtcaagtcaagcgtgaaattactcgcatccttactcccggcactcttaccgatgatggaatgctgaaagcacgctacaataattatttagctgcagtcgttattgccaaaaattattggggacttgcttacacggatatttctactggagagtttctcacgactcaaactgaaggtttagaccagctaacccaagaattaatgcgtttgcaaccttcggaggtgctatttccgactaaagcaccagatataggttttatgttacggccaggagaaagatcggatcatttaccggaatatctccctcattctttttgctattctctgcgcccacaacaaccttttagtttgggggaggcaaaggagcgactgttgatgaaatttcaactggcatccctcgaaggtctcggttgcgaacgtcttcctttgggggtgcgtgctgcgggaggtttactggaatatcttgaagaaacccaaaaggaaaatcaagttcctttacaacgtttgcgtagctatactttggcagattttttgattctcgatcaccagagtcggcggaatttagaaattactcaaacggtgcgggatggtagttatcaaggttcgttgttgtcggtagttgacaagactagtactgcaatgggtgggcgtgctttaagacgttggttgcaacaaccacttcttagtttgaagggtattcgtgctagacatgatactattgacgagctgatacaaaataatgatctacgtcaagatattcaaagagtattacgtcaaatttacgatttagagcgtttaactggccgtactggtgctggtacggcaaatgctagagatttagtttttttagctgactctttaacgaaacttcctgaactttctactttcgtttctcaaggtaattctccttatttaaaggtgttgcaaaaaataccaccaatattacaagaattgggaaaaaaaattcattccaatttagttgagtctccttctcaaaagttaaaagaaggagggttaattcgccctggtataaatgaacgattagatgagatgcggaagttagcagaagaagaccaaaaatggattgcttctttggagacaacggagagagaaaggactggaattcctaatttaaaggttggttataataaggcttttggttattacattagtatttctaaatcaaaggcaaatttggctccggatgattatactcggaagcaaactttgacgaatgaggagcgttatattactgaggaattaaaggaaagagaagttagaattttaacggcacaagatgatttgaatgagctggaatatgatatttttgttgatttaagaaatgaagtaggggaatatgcagaagagattagaaatgtttcccgcgctgtggcagctcttgatattttatgtggtttggcagatgtagcaatttatcaaaattatgtccgtcctactatggttgatagccgagaattgaaaattattgaaggtcgtcatccggtggtagaaaaatatttacctgctgggttttttgtaccaaatactgctatattgggaagtaaaaatttagagaaaaataattcgggaattactccctattcggcgccggatttaattattttaactggtcctaatgctagtggtaaaagttgttatttacggcaggtaggattgattcaattaatggcacaaattggcagttttgttccggcaagctctgctgttttaggggtgagcgatcgcatctttactcgtgtgggagctgtggatgatttagctactggtcaatcaacttttatggtggagatgaatgaaacggcaaatattttgaatcatgctacggaaaagtctttggttttgttggatgaaattggcaggggaacggcaacttttgatggaatttcgattgcttggtcagtggcagaatatttggcaacggaaattttgtctcggacaatttttgctactcattaccacgaattaaatgaactttcttctattttggataatgtggcaaactatcaggtaacagtgaaagaattgccggataaaattgtatttttgcatcaagtacaacctggtggggcggataagtcttatggtattgaagcgggaagattagctggtttaccagattcagtaattgcaagagcaagacaggtaatgcagcaaattgaaaaccatagcaaaatagctattggtttacgaaaaggaattaataaaaaagaagaggaagaaattataactgtggagcagttagatatttttagtgaagaatttggagatagtttattatga

SEQ ID NO: 4271 - protein, 901 aa, Trichodesmium erythraeum
MKYSASTSTPKSAQPKEEELENSLPTNADYSKIDVSKLSEMMQRYVEVKQQYSHALLLFRVGDFFECFFQDAVTIAQELELVQTTKHAGKEIGRVPMTGVPHHAVEKYATFLVEKGYAVVVCDQVEDSAIAKKENRQVKREITRILTPGTLTDDGMLKARYNNYLAAVVIAKNYWGLAYTDISTGEFLTTQTEGLDQLTQELMRLQPSEVLFPTKAPDIGFMLRPGERSDHLPEYLPHSFCYSLRPQQPFSLGEAKERLLMKFQLASLEGLGCERLPLGVRAAGGLLEYLEETQKENQVPLQRLRSYTLADFLILDHQSRRNLEITQTVRDGSYQGSLLSVVDKTSTAMGGRALRRWLQQPLLSLKGIRARHDTIDELIQNNDLRQDIQRVLRQIYDLERLTGRTGAGTANARDLVFLADSLTKLPELSTFVSQGNSPYLKVLQKIPPILQELGKKIHSNLVESPSQKLKEGGLIRPGINERLDEMRKLAEEDQKWIASLETTERERTGIPNLKVGYNKAFGYYISISKSKANLAPDDYTRKQTLTNEERYITEELKEREVRILTAQDDLNELEYDIFVDLRNEVGEYAEEIRNVSRAVAALDILCGLADVAIYQNYVRPTMVDSRELKIIEGRHPVVEKYLPAGFFVPNTAILGSKNLEKNNSGITPYSAPDLIILTGPNASGKSCYLRQVGLIQLMAQIGSFVPASSAVLGVSDRIFTRVGAVDDLATGQSTFMVEMNETANILNHATEKSLVLLDEIGRGTATFDGISIAWSVAEYLATEILSRTIFATHYHELNELSSILDNVANYQVTVKELPDKIVFLHQVQPGGADKSYGIEAGRLAGLPDSVIARARQVMQQIENHSKIAIGLRKGINKKEEEEIITVEQLDIFSEEFGDSLL

SEQ ID NO: 4272 - DNA, 2550 bp, Wolbachia pipientis wMel
  CDS (1)..(2550): transl_table=11
atgtgcaatataatctataataacgtttatcaatacaatatattaaaaaatattatgagcttcgtaaaagaaaaaaacacccctgtgatggagcagtatttgaacctgaaagctcaatacaaagatcatctgctattttataggctaggagatttttatgaattgtttttcgatgatgctattaaagctgcgaaattgctgaatatagtgctcactaagagaggtaattcgtgtgggcaagaaataccaatgtgtggagtgccagcacacagtagtgaatcttacctgcacaagctaatagatttaggattcaaagtagcaatctgtgatcaattagaaactgctgatgaagcaaaaaagaggggctataaatccatagtaaaacgtgatgtagtgcgagttgtaactccaggtacaattatagaagattcactactggaggataaaagcaataattatctcgcatccatagttgaacaaaatgacgaatatgctattagttggcttgaattatcgacgggaaaattttttcacactttaacgagtttgaaagctctagatagtgatttattgcgtatatcaccaagagaattattaatttctgaaaaattcactgaggatgaaaaaattagatcgattttaaaaaattataaaatatcaattacgcaacacgcacagagcttttttgagtatagtaaatctcacagaacattatgcgagttttataaaatcagggaacttgggagtataggaaatttcagcaaagtagaaatcatggcgtgtggtgcactgcttgaatatgtcagagtaacacaaaggggctctattccaaggcttgaattcccaaaaacctataagcaacaaaatttcatgcttattgatacttcagcaaggagaaatcttgagttgttttcaactcaatttggtgaaaagaaaggttcactaatttcagttattgatcatacagttacagcttctggtggacgcctgctcaaacaaatgctcgcttcaccccttgcttgctccaaggcaatcaatttgaggctcagcaccgctcaattttttgtaaataatcatgattcacgcagaaaaatacgagagatattatctaacattccggatattgaaaggtctttatcgcgcttaatactagggcgtggttcaccaaaggatatgaacctattgaaaataggcctaggaaagactttagaattgtctgagttcttatgtaaaattgaatcaggtgaaaatggatctctcccacaacaatatgtcatccaaactgagatccagccagcgtcacgcgctggaataacagtaaaatcagacgagagtgaactaagcacaatacataaaagccttggcaatcataaagacctatttgaactgttaaatagtgctatactcgataataacctcagttccgtgaaagaaggaggatttattcactcaaaatacaactcagaattatctgagttatcttatatattgaacaacagtaacaagttggtaactaagctccgtgaatcttatcgcgatcttactggcattgccgcactcaaaatattacacaacaacatacttggttattacgttgaagtgtcggcaaatcacaaaataacttcggatatatttattcataggcaaagcttagcaaatagcatgcgctacactactaatgaattgaaagaactagaaaataaaattcttacggcacgtgatgctgcaatcggcttagaaatgaaaatttttagtgaactgtgtagtgaagtcgctaaagaatctgaaaaaattgctcttgctgcaaatgctttggcaaaacttgatattagaaccgcatttgcagagcttgcagtgcaaaataattacgtaaaacccattattgatgacagcaaagagttcaatatctgtagcggaagacatccagtggttgaagttaacgataaattcattgcaaatagcatcaatctagctggtatacatctaattactggtcctaatatggctggaaaaagcactttcttgaggcaaaacgctctcattgcaattttagctcacatggggtcatttgtgccagcagagagtgcacatattggagtgattgacaagatattcagcagggttggcgcaacggataatataacagctggttattctaccttcatggtagagatgatcgaaacagcaacgatagtaaatcaggcaacggaccgttccttggtgatacttgatgaaattggtaggggcacaggggtgtatgatggattatctattgcacaggcggtgattgaacatattcacaatgtaaataagtgccgcgccatttttgcaactcattatcatgaattaactaaagtaagcaaatacttgaagaacgtgaaatgtttttgtgtaaaaataagagagtggaacggagaggttatttttctacatgaagtaattgaaggcattgcagatgagtcatatggaatacatgtagcaaaacttgctggttttcctgattctgttttaaatagagcaagtgaagtgtttgaggagctgaaggcttga

SEQ ID NO: 4273 - protein, 849 aa, Wolbachia pipientis wMel
MCNIIYNNVYQYNILKNIMSFVKEKNTPVMEQYLNLKAQYKDHLLFYRLGDFYELFFDDAIKAAKLLNIVLTKRGNSCGQEIPMCGVPAHSSESYLHKLIDLGFKVAICDQLETADEAKKRGYKSIVKRDVVRVVTPGTIIEDSLLEDKSNNYLASIVEQNDEYAISWLELSTGKFFHTLTSLKALDSDLLRISPRELLISEKFTEDEKIRSILKNYKISITQHAQSFFEYSKSHRTLCEFYKIRELGSIGNFSKVEIMACGALLEYVRVTQRGSIPRLEFPKTYKQQNFMLIDTSARRNLELFSTQFGEKKGSLISVIDHTVTASGGRLLKQMLASPLACSKAINLRLSTAQFFVNNHDSRRKIREILSNIPDIERSLSRLILGRGSPKDMNLLKIGLGKTLELSEFLCKIESGENGSLPQQYVIQTEIQPASRAGITVKSDESELSTIHKSLGNHKDLFELLNSAILDNNLSSVKEGGFIHSKYNSELSELSYILNNSNKLVTKLRESYRDLTGIAALKILHNNILGYYVEVSANHKITSDIFIHRQSLANSMRYTTNELKELENKILTARDAAIGLEMKIFSELCSEVAKESEKIALAANALAKLDIRTAFAELAVQNNYVKPIIDDSKEFNICSGRHPVVEVNDKFIANSINLAGIHLITGPNMAGKSTFLRQNALIAILAHMGSFVPAESAHIGVIDKIFSRVGATDNITAGYSTFMVEMIETATIVNQATDRSLVILDEIGRGTGVYDGLSIAQAVIEHIHNVNKCRAIFATHYHELTKVSKYLKNVKCFCVKIREWNGEVIFLHEVIEGIADESYGIHVAKLAGFPDSVLNRASEVFEELKA

SEQ ID NO: 4274 - DNA, 2622 bp, Xanthomonas oryzae pv. oryzae
  CDS (1)..(2622): transl_table=11
ttgcaaaccactgatttcaatacgaaagcctcatctccgaagagcactgccgagcacactccgctcatgaagcaattcttcgcagccaaatcggactaccccgatctgctgctgttcttccgcatgggcgatttctacgagttgttctacgacgacgcgcgcaaggcggcgcggctgctcgacatcaccctgacccagcgcggcagctccggcggtgccccaattcccatggccggggtgccggtgcatgcgtatgaaggctacctggcacgcttggtggcactgggcgagtcggtggcgatctgcgagcagatcggcgatccggcgctggccaaggggctggtcgagcgcaaggtggtgcgcatcgtcacgccaggcacggtcaccgacgaggcgctgctggacgagcgccgcgacacgctgttgatggcgatttcgcgcagcaaacaaggttacggcctggcctgggccgatctggccggtggacgctttttggtcaacgaagtggacaccgtggatgcgctggaagcggagatcgcgcgcctggaacctgccgagctgttggtgcccgacgaagaccactggcctgaattcctgcgcgggcgcattggcgtgcggcgtcggccgccgtggttgttcgatgccgacagcgggcgccgtcagctgctggcgttcttcaaactgcacgatctgtccggcttcggcatcgacgacaaaccctccgccacggccgccgccggcgcgctgctgggctatgtcgaagaaacccagaaacagcgcctgccgcatctgacctcaatcgcgacggaagtggccagcgaggcgatctcgatgaacgcggccacgcgccggcatctggagctggacacgcgtgtggatggcgacacccgcaacaccttgctcggtgtgctggacagcacggtcacgccgatgggcgggcgtttgctgcggcgttggctgcaccgtccgctgcgcctgcgcgatgtgctggtgcagcgccatcatgcggtcggcaacttgatcgatgccggtgccgatgcagacctgcgcgaagccttccgtgcgctcggcgatctggaacgcatcctcacccgcgtggcgctgcgctcggcgcggccgcgcgatttttccaccttgcgagatggcctggcgctgttgccgaaggtgcgcacgatcctggcaccactggattcgccgcgcctgcagacgctgcacgccgaactcggcgagcacgatgccactgcgcatctgttgatcagcgcagtggccgaaacaccgccgctcaagctcagcgatggcggcgtcatcgccagcggttacgacgccgaactggatgagctgcgccgcctctccaccaatgccgatcaattcctgatcgacctggaacaacgcgagcgcgccagcagcggcatcgccacgctcaaggtcggctacaaccgcgtgcacggctactacatcgagatcagcaagggccaggccgaaaaagcgccgctgcactatagccggcggcagacgttgaccaacgccgagcgctacatcaccgaagaactcaagacgttcgaagacaaggtgctgtccgcgcgcgagcgttcgctatcgcgcgaaaaattgctgtacgaaggcctgctcgacacgcttggcaccgagctggaaggcctcaagcgctgcgccggcgcactcagcgaactggatgtcttggccggctttgccgaacgcgcgcaggcgctggattggtcgcagccagagctggatagcgcaccctgtctgcgtatcgaacgcggccgtcacccggtggtggaagcggtgcgcgaccacccgttcgagcccaacgatctggacctgcacagcgaccgccgcatgctggtgatcaccggcccgaacatgggcggcaagtcgacctacatgcgccaaaacgcgttgatcgtgttgttggcgcatatcggcagctacgtgccggccagccgggcggtgatcgggccaatcgaccgcatcctcacccgcatcggcgctggcgacgacctggcgcgcgggcaatccaccttcatggtggaaatggccgaaaccagctacatcctgcatcacgccacgccgcaatcgctggtgctgatggacgagatcggccgtggcacctccacctacgatggtctggccttggccgatgcggtcgcacgtcatctggcgcacaccaatcgctgctacacgctgtttgccacgcattatttcgagctcactgcgctcgccgacgaatcgcatgacggtggcgccagtggcatcgccaatgtgcatctggacgcggtcgaacacggcgagcgcctggtgttcatgcacgcagtgaaagatggcccggccaatcgcagtttcggtctgcaagtggctgcgctggccggcctgcccaaggccgcggtgacgcaggcgcggcgacgcttggtggagttggaacaacgcggcggcgaaagccacagcgcgcagatggcgcccaccgcgctggatgcgccgcaacagttcgggctgttcaccgcaccctcctccgctgcgcaggaagcgttgcaggcgctggatccggacgagctcacgcccaagcaggcgctggaagcgctgtatcggttgaaggcattgctttga

SEQ ID NO: 4275 - protein, 873 aa, Xanthomonas oryzae pv. oryzae
MQTTDFNTKASSPKSTAEHTPLMKQFFAAKSDYPDLLLFFRMGDFYELFYDDARKAARLLDITLTQRGSSGGAPIPMAGVPVHAYEGYLARLVALGESVAICEQIGDPALAKGLVERKVVRIVTPGTVTDEALLDERRDTLLMAISRSKQGYGLAWADLAGGRFLVNEVDTVDALEAEIARLEPAELLVPDEDHWPEFLRGRIGVRRRPPWLFDADSGRRQLLAFFKLHDLSGFGIDDKPSATAAAGALLGYVEETQKQRLPHLTSIATEVASEAISMNAATRRHLELDTRVDGDTRNTLLGVLDSTVTPMGGRLLRRWLHRPLRLRDVLVQRHHAVGNLIDAGADADLREAFRALGDLERILTRVALRSARPRDFSTLRDGLALLPKVRTILAPLDSPRLQTLHAELGEHDATAHLLISAVAETPPLKLSDGGVIASGYDAELDELRRLSTNADQFLIDLEQRERASSGIATLKVGYNRVHGYYIEISKGQAEKAPLHYSRRQTLTNAERYITEELKTFEDKVLSARERSLSREKLLYEGLLDTLGTELEGLKRCAGALSELDVLAGFAERAQALDWSQPELDSAPCLRIERGRHPVVEAVRDHPFEPNDLDLHSDRRMLVITGPNMGGKSTYMRQNALIVLLAHIGSYVPASRAVIGPIDRILTRIGAGDDLARGQSTFMVEMAETSYILHHATPQSLVLMDEIGRGTSTYDGLALADAVARHLAHTNRCYTLFATHYFELTALADESHDGGASGIANVHLDAVEHGERLVFMHAVKDGPANRSFGLQVAALAGLPKAAVTQARRRLVELEQRGGESHSAQMAPTALDAPQQFGLFTAPSSAAQEALQALDPDELTPKQALEALYRLKALL

SEQ ID NO: 4276 - DNA, 2712 bp, Xylella fastidiosa
  CDS (106)..(2712): transl_table=11
ttgcagatcgaatctagccacgattatctgattcaaacccaaagcacctccgagacattcgtgaccgttcataccccggaaggacgtttcttgcaaaacattgacatgagagaaaagcccgaaggtgggaagggcatggcagaacataccccactgatgaagcaatacttcgccgccaaggctgagtatccagacttacttttgttcttccgtatgggagatttttacgagctatttcatcaagatgctcgcaaggcagcgcggttactcgatatcacgttgactcagcggggtagttccggtggtgctccgatcccaatggccggtgtacccgttcatgcctatgaaggctatttggcgcggctcattgccctgggtgaatccgttgcgatttgcgaacaaattggagatccagggcttgctaaagggttggttgaacgtaaggtggtacgcatcgtcactccaggtacgatcactgacgaggtgttactggaggagcgtcgcgacactctattgatggccttatcacgcagtaaaaactgttatggcttggcttgggctgacttagccggtggccgtttcctggtgaacgaagtcaatagcgaggaggcattagaagccgaactcgcacgtctggagccagctgagctgttactccctgacgaggatgcctggccagagtatctacagcagcgcaacggtgtgcgtcgccgtcccccatggttgtttgatgctgacagcggccgccgtaaattgctggcgtttttcaaactgcacgatttatccggcttcggtatcgaaaacaatccacaagccactgcggcggcgggtgcactccttggctacattgaggaaacacagaagcagcgtctaccgcacctgacttcaattacgatggagactgttggcgaagcgattacgatgaacgctgccacacgtcgccatttggagctggacacccgtgtggatggggagagccgccacactctgcttggggtgctcgatagtacggtgaccccgatgggcggacggttgctgcggcggtggctgcatcggccgctgcggctgcgcgaggtggtaagacaacgtcatgctgccgtcgggagcatgatcgatagggatctcgataacaaactcatggagactttccgcaggcttggcgacatggagcggattttgacccgcgtggcattgcgctcagcacgtccacgtgacatctccacattacgggatagcctcagcctcctgccacgtttacgtgagcttctcaatgcatcggattccccgcgcttgcgcgtgttgtacgccgagctgggtgagcatgacagcaccgcgtctttattggtaaaagccgttgcagaacagccacccttaaagctgactgatggcggtgtgatcgcctcagaatacgatgtcgaattggacgaactgcgtaagctctccaacaatgcggatcagttcttgatcgatcttgagacacgcgagcgtgaatccagtggtatttctacgctgaaagtgggttacaaccgcgtgcatggttactatattgagatcagcaagggccaagccgacaaagcacccgtgcattacactcggcgtcagacactgactaacgccgagcgctacatcacggaggaactgaaagcgttcgaagacaaagtattatccgcacgtgatcgtgcgttggtgcgggaaaaattgttgtacgaacagctgctggacaccgtcggggcgcaactggaaccgctgaagcgttgtgccgctgcgttatctgagctagatgtactggtctgctttgctgagcgtgcacagacattggattgggtgcgtccggagttggagcacacatcatgcttgcatattgagggtggccgtcacccggttgtggaagcggtgcgtgaacagcgattcgagccgaatgaccttgatcttcaccctgagcgccgcatgttggttatcaccggccccaatatgggaggcaagtcgacctacatgcgccagaatgccttgattgtcctgcttgcttatatcggcagctacgttccggccagccgcgcgctgattggaccgattgaccgcatcatgacccgtatcggtgctggtgatgacctggcccgaggtcagtcgacatttatgcttgagatgacagagaccagctacattctgcaccatgcgaccgcgcagtcgctggtactgatggacgaaattggtcgggggacctcgacttacgatggcttggcgttggcggatgcagtcgcacgccacttagctcatatcaaccgttgttatacgctgtttgctacgcattattttgagctgactgcactagccgacgaaacatatgagggaggtctgagcggtatcgctaacgtgcatttcgatgctgtcgaacatagtgaacgcttggtgttcatgcacacagtgaaggatggcccggccaatcgcagttttggcctacaggtggctgctttggctggtctaccagctgcggccgtcgcacacgcacggcggcgtttagctgaactggagcagcgaggccgtgaaagtcatgtttcagaaataacaccgctggcattggatgcaccgcagcagtgcagtttatttgcgtcggcgccctcagcagctcaggaagcattggttgcattgcatccggatgagttgacccctaagcaagcactagaagcgctttaccgactcaaagcgctgctataa

SEQ ID NO: 4277 - protein, 868 aa, Xylella fastidiosa
MREKPEGGKGMAEHTPLMKQYFAAKAEYPDLLLFFRMGDFYELFHQDARKAARLLDITLTQRGSSGGAPIPMAGVPVHAYEGYLARLIALGESVAICEQIGDPGLAKGLVERKVVRIVTPGTITDEVLLEERRDTLLMALSRSKNCYGLAWADLAGGRFLVNEVNSEEALEAELARLEPAELLLPDEDAWPEYLQQRNGVRRRPPWLFDADSGRRKLLAFFKLHDLSGFGIENNPQATAAAGALLGYIEETQKQRLPHLTSITMETVGEAITMNAATRRHLELDTRVDGESRHTLLGVLDSTVTPMGGRLLRRWLHRPLRLREVVRQRHAAVGSMIDRDLDNKLMETFRRLGDMERILTRVALRSARPRDISTLRDSLSLLPRLRELLNASDSPRLRVLYAELGEHDSTASLLVKAVAEQPPLKLTDGGVIASEYDVELDELRKLSNNADQFLIDLETRERESSGISTLKVGYNRVHGYYIEISKGQADKAPVHYTRRQTLTNAERYITEELKAFEDKVLSARDRALVREKLLYEQLLDTVGAQLEPLKRCAAALSELDVLVCFAERAQTLDWVRPELEHTSCLHIEGGRHPVVEAVREQRFEPNDLDLHPERRMLVITGPNMGGKSTYMRQNALIVLLAYIGSYVPASRALIGPIDRIMTRIGAGDDLARGQSTFMLEMTETSYILHHATAQSLVLMDEIGRGTSTYDGLALADAVARHLAHINRCYTLFATHYFELTALADETYEGGLSGIANVHFDAVEHSERLVFMHTVKDGPANRSFGLQVAALAGLPAAAVAHARRRLAELEQRGRESHVSEITPLALDAPQQCSLFASAPSAAQEALVALHPDELTPKQALEALYRLKALL

SEQ ID NO: 4278 - DNA, 2676 bp, Zymomonas mobilis
  CDS (1)..(2676): transl_table=11
gtgactgtcaaaaagactaaagctgcaaagaatacctctgcttcaaaatcgcggaatataacaccgatgatggagcaatattacgagctgaaagcgcaagctcaagattgtttgctcttttatcgtatgggggattttttcgaactcttttttgatgatgctaagaaggcttcagcaattcttgatattgctcttactagccgaggcactcatatcgaagaatcgattccgatgtgtggtgttcccattcatgcagcggaatcttatcttgcacgcctaataaaagccggctgccgcgttgcgattgctgatcaggttgaaacaccagcagaagcaaaaaaacgaggtggatcaaaagctctcgtaaaaagagcgattatccgtgtcgtaacggcaggtactttaacagaagaagctttgctagattctcgtgctgcaaactggcttgttgcagtcgctcgtgctggtagtgattttgggttagctgcagctgatatttcgacaggccgttttgaaaccattgctttgtcagaaggccgtctcgattctgagttagcacggctttcagctgctgaagttattgctccagaatctttagttcagcaggaagcttataaaaatcggattccgcaagctgttgagttaagtaatgagtgtttcaatagtccacatggagaagctcgactaaaatcaatcttcaagatttcaacacttgacggctttggaattttttctcgtgccgagcttgctgcaattgatggtttattggcatggctggatcgtgcagggcagggtaaactaccatttttgcagcagcctgttaggcgggcttatgctgatcatatgttgattgatgcggctacccgatctagtcttgagttaactgcctcaacagaaggccggagggatggtagtttagtatcttctattgatcataccgttaccggagctggggctcgccttctgacagcggatcttggtgcgccacttatggatatcgatgttattcataagcgactcgatcttgttgaattctttttttatgatacattgttacgagaggatgttcgagaccttttaaaaggatctcccgatttagcccgggttcttgggcgtttagtcgccggccggggaactccacgtgatttaagcctgctaagagatggcttaaatcaggcttttattctttatgaaaaattattctctcttgaacataaacctgcgcttctggagcagattcttcctgattttcgtgggcatggatccctggttgatcttctcgagcgggctttaatcgaacagcctcccattgatgccactcaaggtggctttatcgccaaaggctacgatcatgctttagatgaattgcggtcgatgggtggagaaagtcgacgtgccattgcggccttagaggcaacctatcgagaaaagacaggtatcaatacgttaaaaatccgtcataataatgtgctgggttatcatattgaggtaccttccagacatgctgatgctttaatgcaagcgaattctggttttacgcatcgtcaaactttggccggggttgtacgttttaacgcgtcagaacttcatgaacaggcaataagagcaacacaggccggcgttcaggcgattgcaattgaaagcaagcatcttgcgtgtttaatcgaaagcactttagaaaaacgtgacaatatagcggcttgtgcggacgccttagcgcgccttgatgtttcagcaggatttgcagattgcgctgtccaaaaaaattggacaaggccaaccgttgatgattcttgctgctttgatgttattcaaggtcgtcatcctgttgtcgaaaatgctttagtaaaatcaggtgaacgctttgttgccaataatactaatttagatcccaaaaaccgtttgtggttagtaactggtcccaatatgggaggtaaatccacttttctgcgtcaaaatgctcttttagctgttttagctcagactggcagttttgttccggcagaaaaagcacggatcggtttggtagatcgtctttttagtcgagttggagcttcagataatttagcgcgggggcgttcaacctttatggttgaaatggtagaaacggcggccatcttgtctcaggcaaccaatcgtagttttgtgattcttgatgaggtcggcaggggaacctcaacctatgatggactggctatcgcttgggccgttgttgaagctgtgcatgatattaacgcatgtcgttgtctattcgcgactcactatcacgagctaacgcaactgacctcgcgtcttcctgctttgtcgcttcaccatgtccgtgccaaagagtggcagggtgatctggttttgctgcatgaaatggcagaaggtgccgcagatagaagttatggtatcgaagttgctcgtttggcaggactgccacccgttgttttaaaacgggcaagtgaggttcttgctcaattagaaaattcttccggtaaaaataacgattcttcagctaatctttctgatttacctcttttcggagtacaggcttttcaaactgttttaccgcagaataatccactttatgatgcagtttcagaattagatgccgacgcgcttactcctcgccaagccttggatattatctatcggctgaaagaactggcagcgaaggataaggtgatgtaa

SEQ ID NO: 4279 - protein, 891 aa, Zymomonas mobilis
MTVKKTKAAKNTSASKSRNITPMMEQYYELKAQAQDCLLFYRMGDFFELFFDDAKKASAILDIALTSRGTHIEESIPMCGVPIHAAESYLARLIKAGCRVAIADQVETPAEAKKRGGSKALVKRAIIRVVTAGTLTEEALLDSRAANWLVAVARAGSDFGLAAADISTGRFETIALSEGRLDSELARLSAAEVIAPESLVQQEAYKNRIPQAVELSNECFNSPHGEARLKSIFKISTLDGFGIFSRAELAAIDGLLAWLDRAGQGKLPFLQQPVRRAYADHMLIDAATRSSLELTASTEGRRDGSLVSSIDHTVTGAGARLLTADLGAPLMDIDVIHKRLDLVEFFFYDTLLREDVRDLLKGSPDLARVLGRLVAGRGTPRDLSLLRDGLNQAFILYEKLFSLEHKPALLEQILPDFRGHGSLVDLLERALIEQPPIDATQGGFIAKGYDHALDELRSMGGESRRAIAALEATYREKTGINTLKIRHNNVLGYHIEVPSRHADALMQANSGFTHRQTLAGVVRFNASELHEQAIRATQAGVQAIAIESKHLACLIESTLEKRDNIAACADALARLDVSAGFADCAVQKNWTRPTVDDSCCFDVIQGRHPVVENALVKSGERFVANNTNLDPKNRLWLVTGPNMGGKSTFLRQNALLAVLAQTGSFVPAEKARIGLVDRLFSRVGASDNLARGRSTFMVEMVETAAILSQATNRSFVILDEVGRGTSTYDGLAIAWAVVEAVHDINACRCLFATHYHELTQLTSRLPALSLHHVRAKEWQGDLVLLHEMAEGAADRSYGIEVARLAGLPPVVLKRASEVLAQLENSSGKNNDSSANLSDLPLFGVQAFQTVLPQNNPLYDAVSELDADALTPRQALDIIYRLKELAAKDKVM

SEQ ID NO: 4280 - DNA, 3258 bp, Oryza sativa
  CDS (1)..(3258)
atgggcaagccgaagcagcaagtgctctcccgcttcttctcccccaagccgcggccctccgcccccgccaccgccgacgatccgccgcctccgcctagacctcccgccgagccgcccgtcgccgccgtcgtctccttctcgcccgccaagcgcgcgcgcgccctctccgtctcccccaaaaccaccgccaaaagggccaagccctcccctcccccttccgactacgttcgccgcaggctgctcgaaccgccccggccgcccccgcccgccgctgtgaaccctagcggcaaagcttacaccccgctggagcagcaggtggtcgacctcaaggcgcgccaccccgacgtcctcctcatggtcgaggtcggttaccgcttccgcttcttcggcgaggacgccgccgtcgccgcctccgtgctcggcatcatcgcccaccccgaccacagcttcctcaccgccagcatccctaccttccgcttgggcttccacgtccgccgcctcgtcgccgcggggcacaaggttggcgtcgtccgccagaccgagacggcggcgatcaaggcggcgcacggcgggggcgcggccggcacgcccttcgcgcgcgggctctcggcggtgtacacgcgcgccactatcgaggccgcggccggggagctggagggcggcggcgcgcccgacgaggggagcaggtacctcgtgtgcgtggtggacaaggaggtggacgccatggggacggaggggttcgaggtgaagatcggggtggtggccatcgaggtttcgaccggtgaggttgtgcacggcgagttcatggacggagtctcgaggaatggccttgaggccgtgctgcttggcttggcgcccgttgaggtcatcctcgggactccaatatcctctgccacggaaaagctgatggtggcatatgccgggcctacctctaatgtccgggttgagcgcacctcgcgtctttgttttagtgagggtggtgctttagctgaactgctctctttgtttgagaagtctggggttgatgctccaactgttgagaatggcagacatttgatggagatgaacgaggagaacaataatcctcgtgggattgagggtatcatggctatgccagaactagttatccatgcactggccttgagtgttcgctatctcaagggttttggtatggacaggataatctgctttggttcttcatttcagccatttacagctaacactgaaatgtctctgtcagcaaatactcttcaacaacttgaggtattgaagaaccactcagatggttcattggatggatcattgttccaaactatgaacaacacatgtacagcttttggatccagattgtttagacactggctgactcaccctttatgtgatagaaatcaaatatgtactcgtcatgacgcggtctctgagatctctgaatcaattggatcacaacaatattcaactaacaatctccaggatgaagtggacatgtcttgctcatcttctgtgagaagtgatctgagcaccattctttcatccgttttgagaatgctggcaggaactcttgatatacaaagaggaataacaaggattttccactgcaaagccacagcgaaagagtttgttggggtcgtccaagctatcctgacggctggaaagcaactgcagaagcttgttcttgaggatacagacaccatgtcttctcagcatagaactgtgcactctcctttgttgagaaggctaataaatacggcttcatcatgtactgtcctggctaatgctgcgacacttgtgtcttgtcttaacaaagatgctgctgatcaaggagatatgctaaacttattcattgcatctgttgatcagttcccagaggttgcagagggtcatgcaactgttgaaatggccaagcagaaattggagctgttaattactgagtatcgaaagcagcttggtgtgcgcaacttggagtttaaaacagtagctgggacaactcatttgattgaactaccggtggatagaaaggtaccttcaagttggatgaaagtaaacagcaccaagaaaacaattagataccacactccggaagtctcgaaaaacttggagaatttattgctggctaaggaaaagctagcagttatctgcaggacaacatggaataacttcctcatggatttcggcagatactatgcgcagtttcaagcaactgttaaatctcttgccactctggactgcttatactcgcttgccactctcgcaaaacaaaataaatatgtacgaccaaattttgttcgtgagaatgaagcaagtcagattcacataaaagatggccgccatccggttctggagtccctacttggagtcaattttgttccaaatgataccgagcttcatgcaaatagtgagtactgccagattgttacaggaccaaacatgggaggaaagagttgctatattcgtcaagttgctctaattacattgatggcccaggttggttccttcgtaccagcttcatcagcaacattgcatgctgttgatggaatttatactcgaatgggcgcgtccgatagtattcagcatggaacaagtaccttttatgaggagttgagtgaagcttccaacatattgcataactgctcatctcggtcactagttatcatcgatgagcttggtcgtggtacaagcacacatgatggtgttgctatagcttatgctacattacactatcttctgaaagagaagaaatgcatggtaatttttgtcactcattatccaaagattcttaatattctgagagaatttgaaggttctgtcggtgcataccatgtctcatatctagcaacacggaaactgttggaagtagctgatagacagatggtgattaacaacacagagacaaaggatcttggtgaaatcactttcttatataaacttgttgctggagcttcagacagaagcttcggtcttaatgttgcgctgcttgcacagcttccatctagctgtattgagcgcgcttcagtcatggcagccaaacttcaacaggagttaagtgagcgtgagaaaaataagttttgtaggctaatggacgttccacgggaaagctctccgaaagagctttgtgcacagccttatcaagggctggctgaagcatgccacaggatactatttaacgttacatctgctcaaagtaatgacgagttaacggatacactatcttctttaagggaagccagggaaattgccttgaaggcaataaaaggctggtga

SEQ ID NO: 4281 - protein, 1085 aa, Oryza sativa
MGKPKQQVLSRFFSPKPRPSAPATADDPPPPPRPPAEPPVAAVVSFSPAKRARALSVSPKTTAKRAKPSPPPSDYVRRRLLEPPRPPPPAAVNPSGKAYTPLEQQVVDLKARHPDVLLMVEVGYRFRFFGEDAAVAASVLGIIAHPDHSFLTASIPTFRLGFHVRRLVAAGHKVGVVRQTETAAIKAAHGGGAAGTPFARGLSAVYTRATIEAAAGELEGGGAPDEGSRYLVCVVDKEVDAMGTEGFEVKIGVVAIEVSTGEVVHGEFMDGVSRNGLEAVLLGLAPVEVILGTPISSATEKLMVAYAGPTSNVRVERTSRLCFSEGGALAELLSLFEKSGVDAPTVENGRHLMEMNEENNNPRGIEGIMAMPELVIHALALSVRYLKGFGMDRIICFGSSFQPFTANTEMSLSANTLQQLEVLKNHSDGSLDGSLFQTMNNTCTAFGSRLFRHWLTHPLCDRNQICTRHDAVSEISESIGSQQYSTNNLQDEVDMSCSSSVRSDLSTILSSVLRMLAGTLDIQRGITRIFHCKATAKEFVGVVQAILTAGKQLQKLVLEDTDTMSSQHRTVHSPLLRRLINTASSCTVLANAATLVSCLNKDAADQGDMLNLFIASVDQFPEVAEGHATVEMAKQKLELLITEYRKQLGVRNLEFKTVAGTTHLIELPVDRKVPSSWMKVNSTKKTIRYHTPEVSKNLENLLLAKEKLAVICRTTWNNFLMDFGRYYAQFQATVKSLATLDCLYSLATLAKQNKYVRPNFVRENEASQIHIKDGRHPVLESLLGVNFVPNDTELHANSEYCQIVTGPNMGGKSCYIRQVALITLMAQVGSFVPASSATLHAVDGIYTRMGASDSIQHGTSTFYEELSEASNILHNCSSRSLVIIDELGRGTSTHDGVAIAYATLHYLLKEKKCMVIFVTHYPKILNILREFEGSVGAYHVSYLATRKLLEVADRQMVINNTETKDLGEITFLYKLVAGASDRSFGLNVALLAQLPSSCIERASVMAAKLQQELSEREKNKFCRLMDVPRESSPKELCAQPYQGLAEACHRILFNVTSAQSNDELTDTLSSLREAREIALKAIKGW

SEQ ID NO: 4282 - DNA, 3686 bp, Zea mays
  CDS (81)..(2909)
  misc_feature (20)..(20): n is a, g, c or t
  misc_feature (21)..(21): n is a, g, c or t
  misc_feature (22)..(22): n is a, g, c or t
  misc_feature (23)..(23): n is a, g, c or t
  misc_feature (24)..(24): n is a, g, c or t
  misc_feature (25)..(25): n is a, g, c or t
  misc_feature (26)..(26): n is a, g, c or t
  misc_feature (27)..(27): n is a, g, c or t
  misc_feature (28)..(28): n is a, g, c or t
  misc_feature (29)..(29): n is a, g, c or t
  misc_feature (30)..(30): n is a, g, c or t
cacatagtccgcactccgcnnnnnnnnnnnaattcggcacgaggagaacctctacgcaccgggtatcgaacgcatctacgatggagggcgacgacttcacgccggagggcggcaagctccccgagttcaagctagatgcgagacaagcgcagggtttcatctccttcttcaagaagctgccgcaggatccccgggccgttcgtctcttcgatcgcagggattattacactgcccatggcgagaatgctacgtttatcgcaaggacatactaccacacaatgtctgccttacgtcaactaggtagcagctctgatggaatcttaagtgccagcgtgagcaaggctatgtttgagaccattgcccgcaacattttgttggaaaggactgactgtacattggaactctatgagggaagtgggtcaaattggaggttaacaaagtccggaacacctggaaatattggtagttttgaagacattctgtttgcaaacaatgacatggaagattcaccagtgattgttgctttgtttccagcgtgccgggaaagtcagctgtatgtagggcttagttttttggatatgaccaataggaagcttgggttggctgagtttcccgaagatagccgattcactaatgttgaatcagctcttgttgcattaggttgcaaggagtgtcttctcccagcagattgtgaaaaatccattgacctaaatccccttcaagacgtcattagtaactgtaatgttctgttgactgagaaaaagaaggctgacttcaaatccagggatctcgcacaagatcttggtagaataatcaggggttctgttgagcctgtacgtgatctactatctcagtttgactatgctcttggtccccttggagctcttttatcttatgccgagttgctagcagatgacactaactatggaaattacacaattgagaagtacaatttgaactgctacatgcgacttgattctgctgcagttcgagcattaaacattgcagaagggaaaactgatgtaaacaagaacttcagtttgtttggtttgatgaacagaacttgtactgttgggatgggaaaaagattgctgaacagatggctgaaacaacctctattagatgttaatgaaattaataaccgactagacatggttcaggcttttgtagaagacccagaacttcgtcagggactccggcaacaacttaaaaggatatcagatattgatcgtctaacacatagtctccgaaagaaatcagctaatctgcagcctgttgttaagctttatcagtcctgtagcagaatcccatacatcaagggcattcttcagcaatataatggccaattttcaacattgataaggtcaaagtttcttgaaccgttagaagaatggatggcaaagaatcgatttggtcggttttcttctcttgttgagacagctattgatcttgctcagctggagaatggagagtacagaatatctcctctatattcttctgacttgggtgtactaaaggatgagctttctgtggttgaaaaccacataaacaatctgcacgtggatacagctagtgatctggatctttctgttgataagcaactgaagctagaaaaaggatcccttggacatgtgttcagaatgtcaaagaaagaggaacagaaagtcaggaagaaactcactggcagctacttaatcatagaaactcgtaaagatggtgtaaagttcacaaattctaagctgaaaaatctaagtgatcaataccaggcattgtttggtgagtacacaagttgtcagaaaaaggtggttggtgatgtagtgagggtttcaggcacattctcagaggtatttgaaaattttgctgcagttctgtcggagttggatgttttacaaagttttgctgatttggcaactagttgcccagttccttatgttaggccagacatcactgcgtcggatgaaggagatattgttctactgggtagcagacatccttgtctagaggcacaagatggtgttaactttatacccaatgattgcactctggtgagagggaaaagttggtttcagatcatcactggaccaaacatgggaggaaaatccacatttataagacaggttggtgtaaatgtattgatggcacaagttggttcctttgtaccttgtgatcaagcaagcattagtgtgagggattgtatttttgctcgtgttggcgctggtgattgccaacttcatggtgtatcaacttttatgcaagaaatgcttgaaacagcatccatcctaaaaggcgcctctgataagtctcttataattattgatgagctggggcgtggaacttccacatatgatggatttggtcttgcatgggctatctgtgagcatcttatggaagtgactcgagcgcctaccttgtttgcaacccatttccatgaactaactgcattagcacatagaaatgatgatgagcaccaacacatttcagacatcggagttgcaaattatcacgtgggtgctcacatagacccattaagtaggaagttaactatgctttacaaggttgaacctggtgcatgcgaccaaagttttggtattcatgttgcagaatttgctaattttccagaagctgttgttgcccttgcgaaaagcaaagcagcagagttagaagacttttctactacacctaccttttccgatgatttgaaagacgaggttggatcaaagcgcaagagggtatttagcccagatgacatcaccagaggagctgcacgggctcggcttttccttgaggaattcgccgcattgcctatggatgagatggatgggagcaagatcttggagatggccaccaagatgaaagctgacttgcagaaagatgcagctgacaatccttggctccagcagttcttctgaagctaattaatccccgcgtgtatggaggcaagaccatgagagaacctcgctgatgctaggatctcctgatccattttgttaatacgcatcagcagatgtactctagtctttaggcttagccgacagtgcaacagggaaaaccatgtgcatatttaacgcggcggtagtgctgctactcctgcataccgttcgggtgcagctactctgctctgccgttctgccccgtctgtgattgcacgccgtcctttacagccgtgaagtctgctgtgccagtctcgtcgaagcttgaagtttctgcacgtctattggctattgctgtgctgcttgtctagcaaaattctttcagtgcaagtagggattgatagtttgtagagattgttgggattttgtcgaggatggcctcacaacgacctttaatcagcttttcaacccagccatacttaccttctaaacaaattaataaaaagaagcaaacttagtgacaaaggtttccttatcaagtcttagtttgggagcaagaagattgaagcggattagatgggctaaaatttatttaattttgaataacaagaagattttaatctctctaatccttttcatttcccttcacaaacaagccctcagtgataaaagaagccttctctaaatatagagagactgctttcaatcatccttattcctaaaaaaggctgatgcgattgggagtttctgttttcctaatgcatagtgtcagtgaataaaagttggttgacttatcttgataacgctgttcagggg

SEQ ID NO: 4283 - protein, 942 aa, Zea mays
MEGDDFTPEGGKLPEFKLDARQAQGFISFFKKLPQDPRAVRLFDRRDYYTAHGENATFIARTYYHTMSALRQLGSSSDGILSASVSKAMFETIARNILLERTDCTLELYEGSGSNWRLTKSGTPGNIGSFEDILFANNDMEDSPVIVALFPACRESQLYVGLSFLDMTNRKLGLAEFPEDSRFTNVESALVALGCKECLLPADCEKSIDLNPLQDVISNCNVLLTEKKKADFKSRDLAQDLGRIIRGSVEPVRDLLSQFDYALGPLGALLSYAELLADDTNYGNYTIEKYNLNCYMRLDSAAVRALNIAEGKTDVNKNFSLFGLMNRTCTVGMGKRLLNRWLKQPLLDVNEINNRLDMVQAFVEDPELRQGLRQQLKRISDIDRLTHSLRKKSANLQPVVKLYQSCSRIPYIKGILQQYNGQFSTLIRSKFLEPLEEWMAKNRFGRFSSLVETAIDLAQLENGEYRISPLYSSDLGVLKDELSVVENHINNLHVDTASDLDLSVDKQLKLEKGSLGHVFRMSKKEEQKVRKKLTGSYLIIETRKDGVKFTNSKLKNLSDQYQALFGEYTSCQKKVVGDVVRVSGTFSEVFENFAAVLSELDVLQSFADLATSCPVPYVRPDITASDEGDIVLLGSRHPCLEAQDGVNFIPNDCTLVRGKSWFQIITGPNMGGKSTFIRQVGVNVLMAQVGSFVPCDQASISVRDCIFARVGAGDCQLHGVSTFMQEMLETASILKGASDKSLIIIDELGRGTSTYDGFGLAWAICEHLMEVTRAPTLFATHFHELTALAHRNDDEHQHISDIGVANYHVGAHIDPLSRKLTMLYKVEPGACDQSFGIHVAEFANFPEAVVALAKSKAAELEDFSTTPTFSDDLKDEVGSKRKRVFSPDDITRGAARARLFLEEFAALPMDEMDGSKILEMATKMKADLQKDAADNPWLQQFF

SEQ ID NO: 4284 - DNA, 2829 bp, Zea mays
  CDS (1)..(2829)
atggagggcgacgacttcacgccggagggcggcaagctccccgagttcaagctagatgcgagacaagcgcagggtttcatctccttcttcaagaagctgccgcaggatccccgggccgttcgtctcttcgatcgcaggggttattacactgcccatggcgagaatgctacgtttatcgcaaggacatactaccacacaatgtctgccttacgtcaactaggtagcagctctgatggaatcttaagtgccagcgtgagcaaggctatgtttgagaccattgcccgcaacattttgttggaaaggactgactgtacattggaactctatgagggaagtgggtcaaattggaggttaacaaagtccggaacacctggaaatattggtagttttgaagacattctgtttgcaaacaatgacatggaagattcaccagtgattgttgctttgtttccagcgtgccgggaaagtcagctgtatgtagggcttagttttttggatatgaccaataggaagcttgggttggctgagtttcccgaagatagccgattcactaatgttgaatcagctcttgttgcattaggttgcaaggagtgtcttctcccagcagattgtgaaaaatccattgacctaaacccccttcaagacgtcattagtaactgtaatgttctgttgactgagaaaaagaaggctgacttcaaatccagggatctcgcacaagatcttggtagaataatcaggggttctgttgagcctgtacgtgatctactatctcagtttgactatgctcttggtccccttggagctcttttatcttatgccgagttgctagcagatgacactaactatggaaattacacaattgagaagtacaatttgaactgctacatgcgacttgattctgctgcagttcgagcattaaacattgcagaagggaaaactgatgtaaacaagaacttcagtttgtttggtttgatgaacagaacttgtactgttgggatgggaaaaagattgctgaacagatggctgaaacaacctctattagatgttaatgaaattaataaccgactagacatggttcaggcttttgtagaagacccagaacttcgtcagggactccggcaacaacttaaaaggatatcagatattgatcgtctaacacatagtctccgaaagaaatcagctaatctgcagcctgttgttaagctttatcagtcctgtagcagaatcccatacatcaagggcattcttcagcaatataatggccaattttcaacattgataaggtcaaagtttcttgaaccgttagaagaatggatggcaaagaatcgatttggtcggttttcttctcttgttgagacagctattgatcttgctcagctggagaatggagagtacagaatatctcctctatattcttctgacttgggtgtactaaaggatgagctttctgtggttgaaaaccacataaacaatctgcacgtggatacagctagtgatctggatctttctgttgataagcaactgaagctagaaaaaggatcccttggacatgtgttcagaatgtcaaagaaagaggaacagaaagtcaggaagaaactcactggcagctacttaatcatagaaactcgtaaagatggtgtaaagttcacaaattctaagctgaaaaatctaagtgatcaataccaggcattgtttggtgagtacacaagttgtcagaaaaaggtggttggtgatgtagtgagggtttcaggcacattctcagaggtatttgaaaattttgctgcagttctgtcggagttggatgttttacaaagttttgctgatttggcaactagttgcccagttccttatgttaggccagacatcactgcgtcggatgaaggagatattgttctactgggtagcagacatccttgtctagaggcacaagatggtgttaactttatacccaatgattgcactctggtgagagggaaaagttggtttcagatcatcactggaccaaacatgggaggaaaatccacatttataagacaggttggtgtaaatgtattgatggcacaagttggttcctttgtaccttgtgatcaagcaagcattagtgtgagggattgtatttttgctcgtgttggcgctggtgattgccaacttcatggtgtatcaacttttatgcaagaaatgcttgaaacagcatccatcctaaaaggcgcctctgataagtctcttataattattgatgagctggggcgtggaacttccacatatgatggatttggtcttgcatgggctatctgtgagcatcttatggaagtgactcgagcgcctaccttgtttgcaacccatttccatgaactaactgcattagcacatagaaatgatgatgagcaccaacacatttcagacatcggagttgcaaattatcacgtgggtgctcacatagacccattaagtaggaagttaactatgctttacaaggttgaacctggtgcatgcgaccaaagttttggtattcatgttgcagaatttgctaattttccagaagctgttgttgcccttgcgaaaagcaaagcagcagagttagaagacttttctactacacctaccttttccgatgatttgaaagacgaggttggatcaaagcgcaagagggtatttagcccagatgacatcaccagaggagctgcacgggctcggcttttccttgaggaattcgccgcattgcctatggatgagatggatgggagcaagatcttggagatggccaccaagatgaaagctgacttgcagaaagatgcagctgacaatccttggctccagcagttcttctga

SEQ ID NO: 4285 - protein, 942 aa, Zea mays
MEGDDFTPEGGKLPEFKLDARQAQGFISFFKKLPQDPRAVRLFDRRGYYTAHGENATFIARTYYHTMSALRQLGSSSDGILSASVSKAMFETIARNILLERTDCTLELYEGSGSNWRLTKSGTPGNIGSFEDILFANNDMEDSPVIVALFPACRESQLYVGLSFLDMTNRKLGLAEFPEDSRFTNVESALVALGCKECLLPADCEKSIDLNPLQDVISNCNVLLTEKKKADFKSRDLAQDLGRIIRGSVEPVRDLLSQFDYALGPLGALLSYAELLADDTNYGNYTIEKYNLNCYMRLDSAAVRALNIAEGKTDVNKNFSLFGLMNRTCTVGMGKRLLNRWLKQPLLDVNEINNRLDMVQAFVEDPELRQGLRQQLKRISDIDRLTHSLRKKSANLQPVVKLYQSCSRIPYIKGILQQYNGQFSTLIRSKFLEPLEEWMAKNRFGRFSSLVETAIDLAQLENGEYRISPLYSSDLGVLKDELSVVENHINNLHVDTASDLDLSVDKQLKLEKGSLGHVFRMSKKEEQKVRKKLTGSYLIIETRKDGVKFTNSKLKNLSDQYQALFGEYTSCQKKVVGDVVRVSGTFSEVFENFAAVLSELDVLQSFADLATSCPVPYVRPDITASDEGDIVLLGSRHPCLEAQDGVNFIPNDCTLVRGKSWFQIITGPNMGGKSTFIRQVGVNVLMAQVGSFVPCDQASISVRDCIFARVGAGDCQLHGVSTFMQEMLETASILKGASDKSLIIIDELGRGTSTYDGFGLAWAICEHLMEVTRAPTLFATHFHELTALAHRNDDEHQHISDIGVANYHVGAHIDPLSRKLTMLYKVEPGACDQSFGIHVAEFANFPEAVVALAKSKAAELEDFSTTPTFSDDLKDEVGSKRKRVFSPDDITRGAARARLFLEEFAALPMDEMDGSKILEMATKMKADLQKDAADNPWLQQFF

SEQ ID NO: 4286 - DNA, 25 bp, Artificial sequence
  primer
atgaagcatttctttaggctaccga

SEQ ID NO: 4287 - DNA, 24 bp, Artificial sequence
  primer
ttatcccaatatttcgcgggcttc

SEQ ID NO: 4288 - protein, 1224 aa, Artificial sequence
  consensus sequence
  Variant (3)..(9): Xaa in position 3 to 9 is any amino acid
  Variant (10)..(10): Xaa in position 10 is any or no amino acid
  Variant (12)..(12): Xaa in position 12 is any amino acid
  Variant (13)..(18): Xaa in position 13 to 18 is any or no amino acid
  Variant (20)..(21): Xaa in position 20 to 21 is any amino acid
  Variant (23)..(23): Xaa in position 23 is any amino acid
  Variant (29)..(29): Xaa in position 29 is any amino acid
  Variant (31)..(32): Xaa in position 31 to 32 is any amino acid
  Variant (35)..(40): Xaa in position 35 to 40 is any amino acid
  Variant (42)..(44): Xaa in position 42 to 44 is any amino acid
  Variant (47)..(52): Xaa in position 47 to 52 is any amino acid
  Variant (53)..(66): Xaa in position 53 to 66 is any or no amino acid
  Variant (68)..(68): Xaa in position 68 is any amino acid
  Variant (70)..(70): Xaa in position 70 is any amino acid
  Variant (72)..(72): Xaa in position 72 is any amino acid
  Variant (74)..(77): Xaa in position 74 to 77 is any amino acid
  Variant (79)..(81): Xaa in position 79 to 81 is any amino acid
  Variant (83)..(85): Xaa in position 83 to 85 is any amino acid
  Variant (86)..(87): Xaa in position 86 to 87 is any or no amino acid
  Variant (89)..(90): Xaa in position 89 to 90 is any amino acid
  Variant (93)..(95): Xaa in position 93 to 95 is any amino acid
  Variant (97)..(107): Xaa in position 97 to 107 is any amino acid
  Variant (108)..(146): Xaa in position 108 to 146 is any or no amino acid
  Variant (148)..(150): Xaa in position 148 to 150 is any amino acid
  Variant (152)..(153): Xaa in position 152 to 153 is any amino acid
  Variant (158)..(182): Xaa in position 158 to 182 is any amino acid
  Variant (183)..(246): Xaa in position 183 to 246 is any or no amino acid
  Variant (248)..(250): Xaa in position 248 to 250 is any amino acid
  Variant (252)..(271): Xaa in position 252 to 271 is any amino acid
  Variant (272)..(280): Xaa in position 272 to 280 is any or no amino acid
  Variant (282)..(282): Xaa in position 282 is any amino acid
  Variant (284)..(333): Xaa in position 284 to 333 is any amino acid
  Variant (334)..(377): Xaa in position 334 to 377 is any or no amino acid
  Variant (379)..(402): Xaa in position 379 to 402 is any amino acid
  Variant (403)..(426): Xaa in position 403 to 426 is any or no amino acid
  Variant (428)..(433): Xaa in position 428 to 433 is any amino acid
  Variant (436)..(441): Xaa in position 436 to 441 is any amino acid
  Variant (442)..(463): Xaa in position 442 to 463 is any or no amino acid
  Variant (465)..(470): Xaa in position 465 to 470 is any amino acid
  Variant (472)..(472): Xaa in position 472 is any amino acid
  Variant (474)..(475): Xaa in position 474 to 475 is any amino acid
  Variant (476)..(476): Xaa in position 476 is any or no amino acid
  Variant (478)..(478): Xaa in position 478 is any amino acid
  Variant (480)..(480): Xaa in position 480 is any amino acid
  Variant (482)..(487): Xaa in position 482 to 487 is any amino acid
  Variant (489)..(497): Xaa in position 489 to 497 is any amino acid
  Variant (499)..(515): Xaa in position 499 to 515 is any amino acid
  Variant (516)..(538): Xaa in position 516 to 538 is any or no amino acid
  Variant (540)..(543): Xaa in position 540 to 543 is any amino acid
  Variant (544)..(550): Xaa in position 544 to 550 is any or no amino acid
  Variant (552)..(553): Xaa in position 552 to 553 is any amino acid
  Variant (555)..(619): Xaa in position 555 to 619 is any amino acid
  Variant (620)..(661): Xaa in position 620 to 661 is any or no amino acid
  Variant (663)..(702): Xaa in position 663 to 702 is any amino acid
  Variant (703)..(775): Xaa in position 703 to 775 is any or no amino acid
  Variant (777)..(782): Xaa in position 777 to 782 is any amino acid
  Variant (783)..(784): Xaa in position 783 to 784 is any or no amino acid
  Variant (786)..(803): Xaa in position 786 to 803 is any amino acid
  Variant (804)..(820): Xaa in position 804 to 820 is any or no amino acid
  Variant (822)..(824): Xaa in position 822 to 824 is any amino acid
  Variant (825)..(827): Xaa in position 825 to 827 is any or no amino acid
  Variant (829)..(833): Xaa in position 829 to 833 is any amino acid
  Variant (835)..(837): Xaa in position 835 to 837 is any amino acid
  Variant (839)..(851): Xaa in position 839 to 851 is any amino acid
  Variant (853)..(873): Xaa in position 853 to 873 is any amino acid
  Variant (875)..(880): Xaa in position 875 to 880 is any amino acid
  Variant (882)..(886): Xaa in position 882 to 886 is any amino acid
  Variant (888)..(889): Xaa in position 888 to 889 is any amino acid
  Variant (891)..(897): Xaa in position 891 to 897 is any amino acid
  Variant (898)..(899): Xaa in position 898 to 899 is any or no amino acid
  Variant (901)..(908): Xaa in position 901 to 908 is any amino acid
  Variant (909)..(921): Xaa in position 909 to 921 is any or no amino acid
  Variant (923)..(924): Xaa in position 923 to 924 is any amino acid
  Variant (932)..(935): Xaa in position 932 to 935 is any amino acid
  Variant (936)..(964): Xaa in position 936 to 964 is any or no amino acid
  Variant (966)..(967): Xaa in position 966 to 967 is any amino acid
  Variant (969)..(978): Xaa in position 969 to 978 is any amino acid
  Variant (979)..(1023): Xaa in position 979 to 1023 is any or no amino acid
  Variant (1029)..(1029): Xaa in position 1029 is any amino acid
  Variant (1034)..(1035): Xaa in position 1034 to 1035 is any amino acid
  Variant (1038)..(1038): Xaa in position 1038 is any amino acid
  Variant (1042)..(1044): Xaa in position 1042 to 1044 is any amino acid
  Variant (1046)..(1047): Xaa in position 1046 to 1047 is any amino acid
  Variant (1049)..(1050): Xaa in position 1049 to 1050 is any amino acid
  Variant (1054)..(1055): Xaa in position 1054 to 1055 is any amino acid
  Variant (1056)..(1056): Xaa in position 1056 is any or no amino acid
  Variant (1058)..(1062): Xaa in position 1058 to 1062 is any amino acid
  Variant (1064)..(1065): Xaa in position 1064 to 1065 is any amino acid
  Variant (1067)..(1067): Xaa in position 1067 is any amino acid
  Variant (1069)..(1069): Xaa in position 1069 is any amino acid
  Variant (1072)..(1072): Xaa in position 1072 is any amino acid
  Variant (1074)..(1077): Xaa in position 1074 to 1077 is any amino acid
  Variant (1079)..(1079): Xaa in position 1079 is any amino acid
  Variant (1087)..(1087): Xaa in position 1087 is any amino acid
  Variant (1089)..(1091): Xaa in position 1089 to 1091 is any amino acid
  Variant (1094)..(1095): Xaa in position 1094 to 1095 is any amino acid
  Variant (1097)..(1099): Xaa in position 1097 to 1099 is any amino acid
  Variant (1102)..(1104): Xaa in position 1102 to 1104 is any amino acid
  Variant (1107)..(1107): Xaa in position 1107 is any amino acid
  Variant (1112)..(1112): Xaa in position 1112 is any amino acid
  Variant (1114)..(1114): Xaa in position 1114 is any amino acid
  Variant (1117)..(1119): Xaa in position 1117 to 1119 is any amino acid
  Variant (1121)..(1135): Xaa in position 1121 to 1135 is any amino acid
  Variant (1136)..(1138): Xaa in position 1136 to 1138 is any or no amino acid
  Variant (1143)..(1144): Xaa in position 1143 to 1144 is any amino acid
  Variant (1145)..(1145): Xaa in position 1145 is any or no amino acid
  Variant (1148)..(1162): Xaa in position 1148 to 1162 is any amino acid
  Variant (1163)..(1174): Xaa in position 1163 to 1174 is any or no amino acid
  Variant (1176)..(1181): Xaa in position 1176 to 1181 is any amino acid
  Variant (1182)..(1192): Xaa in position 1182 to 1192 is any or no amino acid
  Variant (1194)..(1199): Xaa in position 1194 to 1199 is any amino acid
  Variant (1201)..(1204): Xaa in position 1201 to 1204 is any amino acid
  Variant (1208)..(1209): Xaa in position 1208 to 1209 is any amino acid
  Variant (1212)..(1212): Xaa in position 1212 is any amino acid
  Variant (1216)..(1216): Xaa in position 1216 is any amino acid
  Variant (1218)..(1223): Xaa in position 1218 to 1223 is any amino acid
TPXXXXXXXXKXXXXXXXLXXRXGDFYEXFXXDAXXXXXXLXXXLTXXXXXXXXXXXXXXXXXXXXMXGXPXHXXXXYXXXLXXXXXGXXVAXXXQXXXXXXXXXXXXXXXXXXXXXXXXXXXXXXXXXXXXXXXXXXXXXXXXXXRXXXRXXTPGTXXXXXXXXXXXXXXXXXXXXXXXXXXXXXXXXXXXXXXXXXXXXXXXXXXXXXXXXXXXXXXXXXXXXXXXXXXXXXXXXXXXXXXXXXDXXXGXXXXXXXXXXXXXXXXXXXXXXXXXXXXXPXEXXXXXXXXXXXXXXXXXXXXXXXXXXXXXXXXXXXXXXXXXXXXXXXXXXXXXXXXXXXXXXXXXXXXXXXXXXXXXXXXXXXXXXXXXXXXXXYXXXXXXXXXXXXXXXXXXXXXXXXXXXXXXXXXXXXXXXXXXXXXXXXDXXXXXXLEXXXXXXXXXXXXXXXXXXXXXXXXXXXXLXXXXXXTXTXXXGXRXLXXXXXXPXXXXXXXXXRXXXXXXXXXXXXXXXXXXXXXXXXXXXXXXXXXXXXXXXXLXXXXXXXXXXXDXXRXXXXXXXXXXXXXXXXXXXXXXXXXXXXXXXXXXXXXXXXXXXXXXXXXXXXXXXXXXXXXXXXXXXXXXXXXXXXXXXXXXXXXXXXXXXXXXXXXXXXXXXXXXXGXXXXXXXXXXXXXXXXXXXXXXXXXXXXXXXXXXXXXXXXXXXXXXXXXXXXXXXXXXXXXXXXXXXXXXXXXXXXXXXXXXXXXXXXXXXXXXXXXXXXXXXXXXXXXXXXXLXXXXXXXXGXXXXXXXXXXXXXXXXXXXXXXXXXXXXXXXXXXXQXXXXXXRXXXXXLXXXEXXXXXXXXXXXXXEXXXXXXXXXXXXXXXXXXXXXAXXXXXXDXXXXXAXXAXXXXXXXXXPXXXXXXXXXXXXXXXXXXXXXIXXGRHPVVEXXXXXXXXXXXXXXXXXXXXXXXXXXXXXXXXXFXXNXXXXXXXXXXXXXXXXXXXXXXXXXXXXXXXXXXXXXXXXXXXXXXXXXXXXXXXTGPNMXGKSTXXRQXALIXXXAXXGXXVPAXXXAXXXXXDXXFXRXGAXDXXXXGXSTFMVEMXEXXXILXXAXXXSLXXXDEXGRGTXTXDGXXXAXXXXXXXXXXXXXXXXXXFATHXXXELXXXXXXXXXXXXXXXXXXXXXXXXXXXEXXXXXXXXXXXXXXXXXFXXXXXXGXXXXSYGXXVAXLAGXPXXXXXXA

SEQ ID NO: 4289 - protein, 38 aa, Artificial sequence
  protein pattern
  Variant (2)..(2): Xaa in position 2 is any amino acid
  Variant (5)..(5): Xaa in position 5 is any amino acid
  Variant (7)..(7): Xaa in position 7 is any amino acid
  Variant (8)..(8): Xaa in position 8 is Ala, Asn or Ser
  Variant (9)..(9): Xaa in position 9 is any amino acid
  Variant (12)..(14): Xaa in position 12 to 14 is any amino acid
  Variant (15)..(15): Xaa in position 15 is Asp, Gly, Ser or Thr
  Variant (16)..(17): Xaa in position 16 to 17 is any amino acid
  Variant (18)..(18): Xaa in position 18 is Ala or Ser
  Variant (19)..(19): Xaa in position 19 is Phe, Ile, Leu or Met
  Variant (20)..(20): Xaa in position 20 is Ala, Ile, Leu or Val
  Variant (21)..(21): Xaa in position 21 is Ile, Leu or Val
  Variant (22)..(22): Xaa in position 22 is Phe, Ile, Leu, Met or Val
  Variant (25)..(25): Xaa in position 25 is Ile, Leu or Val
  Variant (30)..(30): Xaa in position 30 is Ala, Gly, Ser or Thr
  Variant (31)..(32): Xaa in position 31 to 32 is any amino acid
  Variant (33)..(33): Xaa in position 33 is Ala, Asp or Glu
  Variant (35)..(35): Xaa in position 35 is any amino acid
  Variant (36)..(36): Xaa in position 36 is Ala, Gly or Ser
  Variant (37)..(37): Xaa in position 37 is Ile, Leu or Val
MXEMXEXXXILXXXXXXXXXXXDEXGRGTXXXXGXXXA

SEQ ID NO: 4290 - protein, 34 aa, Artificial sequence
  protein pattern
  Variant (2)..(4): Xaa in position 2 to 4 is any or no amino acid
  Variant (9)..(9): Xaa in position 9 is any amino acid
  Variant (10)..(10): Xaa in position 10 is Ala, Gly or Ser
  Variant (14)..(14): Xaa in position 14 is Ala, Cys, Ser or Thr
  Variant (15)..(15): Xaa in position 15 is any amino acid
  Variant (16)..(16): Xaa in position 16 is Ile, Leu or Met
  Variant (19)..(19): Xaa in position 19 is any amino acid
  Variant (20)..(20): Xaa in position 20 is Ala or Gly
  Variant (21)..(21): Xaa in position 21 is Ile, Leu, Met or Val
  Variant (22)..(23): Xaa in position 22 to 23 is any amino acid
  Variant (24)..(24): Xaa in position 24 is Ile, Leu or Val
  Variant (25)..(25): Xaa in position 25 is Ile, Leu or Met
  Variant (26)..(26): Xaa in position 26 is Ala, Cys or Gly
  Variant (27)..(28): Xaa in position 27 to 28 is any amino acid
  Variant (30)..(31): Xaa in position 30 to 31 is any amino acid
  Variant (33)..(33): Xaa in position 33 is Ala or Pro
  Variant (34)..(34): Xaa in position 34 is Ala, Cys or Ser
IXXXTGPNXXGKSXXXRQXXXXXXXXXXGXXVXX

SEQ ID NO: 4291 - protein, 19 aa, Artificial sequence
  protein pattern
  Variant (2)..(2): Xaa in position 2 is any amino acid
  Variant (3)..(3): Xaa in position 3 is Ile, Leu or Val
  Variant (5)..(5): Xaa in position 5 is Ser or Thr
  Variant (7)..(7): Xaa in position 7 is Ile, Leu, Met or Val
  Variant (9)..(9): Xaa in position 9 is any or no amino acid
  Variant (11)..(11): Xaa in position 11 is any amino acid
  Variant (13)..(17): Xaa in position 13 to 17 is any amino acid
  Variant (18)..(18): Xaa in position 18 is any or no amino acid
DXXFXRXGXAXDXXXXXXS

SEQ ID NO: 4292 - DNA, 2349 bp, Saccharomyces cerevisiae
  CDS (1)..(2349)
atgcagttgtctatgcggatgatgttcacaccaaaacatcagaaactggtcaatcaatgttatcctacgggaaggaccacagataagaagcctaaatcttcggaaacttcatatttgctatattacgttaactcgaggcgtagtaaattggagaaagttagcacttacctgattaagcgttccacttccgacttgaaccatcggcgcatagggaacatagccgttacattggatttaatgaacaaaattgtgttgcattgtaaggagaatttgaatgtatttgttaaagattttttgtacattatgaacaaagttctttccaacaacaattttaacaatgatgtatctgttgttgaattaatagaactggcatttagtagtatatgccagaacttggacgacgtcttgtgtaacggtgacatggaattcgtccagttataccagaactttgttgatcttttttttaaaatagttactgaaagaattcataatgatgacatgcttctgaaatgctgtattgatatatcaaacacaaatagtgtttcaagcaacccacaactaaaccactttgtttccaagtctgttgcctatactatttcaaagttccaagagagaaatccgaaatttaaaactttgtcgctggaagcagctctggagagcaatttaggaaaaaggctaagtcgaacacaaactcgtacaattgggttagataaggccgccgaagataatcatgacctttcagtaaaagcattgcaatcctattttaacacaactgagacagacaaattgaatttgtctattcgtactctgttgcgctgtctgcaaagtacacctaataaggaactgctagagtttgtatgcaatggtatacctgttcagttacgatatattgttatacttcttttggtcagacaactaagcgacaaggataaaaatgtaaatccaattgtttccttgaaattgatgtcgtcattacttgtttcagatgtcagtatagtggggttgagtgttcttgatataatgagaaagcttttaaatttccagttgaaaaatgcaactaataaagaagttgtggcacagtcttgtatcaccatgacagaccttaaccataaaacttattacgctgaacagacctcagatatgttatatgaactactattgaaattgaaaagtgacaccgtcaaggatgttgaaaagaatgcagttgtggaagatattgatttcctcgttgaacatattacgcagccaagtatcagtttggaattattcatcgacttggcgcattacatgaaaaaccacattatatgtttatttaacattgttgaaactgaggttccaagcagcattctcttttcaaaactgtactcattattacgtgaactggattcacatggtgtgcaaaaagaaatgatggaagagatctttgacaagtatggaaaaatggcactattatccggtttgaattattttctagagaacgtttctgagcctgagtatacctattattcgtaccatttacaagcagctaactttttaaaactcaatgactacaagtcacaaactgagtacaaaatgcaaactagaactttgtttaccaaggaagatttattgtcatactattctgatactggatcaaataaatacagcaagaagggggcgcagattttattgtctcgtgataatcaaatttctacttctgatttactgtcggactctcaagttcgtactacacctctggagtacaagaatgtccctaatgctattttttcaaatgggaaagcagtgtatgataacaacgattttgcggccaagcaaaataaattcgacaacagcatagatgacaatatagaagaagctaacgatactgtaatttctgatgctaatgcaaaaggtagtatctataggtttgttgctgaggacgcaagatcatggaaaacaatgagagccaccgcaccaaaagttagcgatttgaaaaaaactatgaatgaaaagaatattccaaataatatgaaaagagatggctcttttcggggttctcaatcagtgaaatctcgtgtcactaatatcacatttttattaaatgaattgaaaactttttcagatgacgcgaataaaatcaaagatcctgatgaggagaatattgttggcttggataaaatcgacgttgctagatcaaattctctgcgacttgcaccaatatctagtctttctgatcgcagtagcattggaaatagaaaatcctttttgcaaaaaacagcaactggtgaaaatcaaaacgatgactttaaagacgcaaatgaagatttacattctttaagttcaagaggtaaaattttctcctccacttga

SEQ ID NO: 4293 - protein, 782 aa, Saccharomyces cerevisiae
MQLSMRMMFTPKHQKLVNQCYPTGRTTDKKPKSSETSYLLYYVNSRRSKLEKVSTYLIKRSTSDLNHRRIGNIAVTLDLMNKIVLHCKENLNVFVKDFLYIMNKVLSNNNFNNDVSVVELIELAFSSICQNLDDVLCNGDMEFVQLYQNFVDLFFKIVTERIHNDDMLLKCCIDISNTNSVSSNPQLNHFVSKSVAYTISKFQERNPKFKTLSLEAALESNLGKRLSRTQTRTIGLDKAAEDNHDLSVKALQSYFNTTETDKLNLSIRTLLRCLQSTPNKELLEFVCNGIPVQLRYIVILLLVRQLSDKDKNVNPIVSLKLMSSLLVSDVSIVGLSVLDIMRKLLNFQLKNATNKEVVAQSCITMTDLNHKTYYAEQTSDMLYELLLKLKSDTVKDVEKNAVVEDIDFLVEHITQPSISLELFIDLAHYMKNHIICLFNIVETEVPSSILFSKLYSLLRELDSHGVQKEMMEEIFDKYGKMALLSGLNYFLENVSEPEYTYYSYHLQAANFLKLNDYKSQTEYKMQTRTLFTKEDLLSYYSDTGSNKYSKKGAQILLSRDNQISTSDLLSDSQVRTTPLEYKNVPNAIFSNGKAVYDNNDFAAKQNKFDNSIDDNIEEANDTVISDANAKGSIYRFVAEDARSWKTMRATAPKVSDLKKTMNEKNIPNNMKRDGSFRGSQSVKSRVTNITFLLNELKTFSDDANKIKDPDEENIVGLDKIDVARSNSLRLAPISSLSDRSSIGNRKSFLQKTATGENQNDDFKDANEDLHSLSSRGKIFSST

SEQ ID NO: 4294 - DNA, 2358 bp, Saccharomyces pastorianus
  CDS (1)..(2358)
atgcaattgtctatgcggatgatgttcacaccaaagcaccagaaactggtcaatcaatgttatcctacggggaggactactgataagaagcctaagtcatcggagacttcatatttgctatattatgtcaactcgagacgtagcaaattggaaaaggtcagcacttacctaattaaaagatctacttctgatttgaaccatcgccgtataggaaatatagctgttacattggatttgatgaataagattgtgctgcattgcagagaaaacttaaacgtattcgttaaagattttttgtatattatgaacaaagttctctcgaacaacaatttcaacaatgatgtagccgtcgtggaattggtagaactggcattcagtagcatatgcctgaatttggatgacgtcttatgtaacggtgatatggaatttattcagttatatcaaagttttgtcgatctattctttaaaatagtcactgaaagaattcataatgatgatatgcttttaaaatgctgtattgatatatcgaacacaaacagcgtttcaagtaatcctcaattgaattattttgtctccaaatccgtaacatacactatttccaaatttcaagaaagaaatccaaaatttaaaacgctgtcattaggaccagttttagacggtaatttaggtaatttaggtaaacgactaagtcgaacacaaacccgcaccgttggattggataaaactgttgacgacaacaatgatatctctataagggctttacaatcatatttcaacacaactgagacagataaattaaacctatccatacgtactttgttacgttgtctgcaaaatacgccaaataaggaactgctagaatttatatgtaacggcatacctgttcagctgcgatacatcgttattcttcttttagtcagacaattaagcgacaaggataaaaatgtggatccggtcgtttctttgaaattgatgtcatcattgcttgtctctgacgttagtatagtaggcttaagtgtccttgatataatgagaaagcttttaaatttccaattgaagaacgtagccgataaagaagttgtggagcaatcctgtattactatgacagacttgaatcacaaaacttattacactgaacagacttcagatatgctttatgaactactcttaaaattgaagagtgataccactaaagacctagagaggaacgcagttgtggaagacgttgattatcttgttgagcacattacacaaccaagtattagtttggaactattcattgatttggcgcattacatgagaaatcaaattataagtttatttgccattgttgaaaccgaggttccgactggatttgtcttttcaaaactctattcattattgcgtgaactggattcacatggtgtgcaaaaagaaatgatggaagaaatttttgataagtatggaaaagtggcactattatccggtttgcattatttcttggagaacgtttctgaacctgaatacacctactattcgtatcatttacaagctgctgaatttttaaaattgaatgattacaaatcgcaaactgaatacaaaatgcaaactaagacactatttactaaggaagatttattgtcttactattccgatatgggatcgaacaaatacaccaatagaggcgcacaaattttgatgtctcgtgacaaccaaatttccacttctgatttactatcggatttccaagttcgtactacatctccagattacaggactgtgcctaatgtcgtcttaccaaacggtaattcaatgcccaataataaagatgttacaataaagcaaagcagattcgataaaagcatagatgacaaagtagacgaaggcaatgatactgttatttctgatgctaatgcaaagggtagtatctacaggtttgttgctgaagatgcgagatcatggaaaacaatgagagtcactgcgccaaaaattagtgacttgaaaaaagcaattaatgaaagaaaaaatccaaatgacatgaaaagagatggatctgttcgctgttctcaatcggtgaaatctcgcgttactaatattacgtttttgctaagtgaattaaaaaatttttcagaggacgcaaacaatgttaaagatcccgatgaggaaaatattgttggcttagataaaattgatgtggctagatctaattccctgcgacttgcaccaatatcgagtgtttccgatcggagtagtattggaaatagaaggtccttgatacaaaagacgcctgtcgttgaggatcaagacgacgactttaaagacgcaaacgaagatttacattctttaagttctagaggtaaaatattttcctccacttga

SEQ ID NO: 4295 - protein, 785 aa, Saccharomyces pastorianus
MQLSMRMMFTPKHQKLVNQCYPTGRTTDKKPKSSETSYLLYYVNSRRSKLEKVSTYLIKRSTSDLNHRRIGNIAVTLDLMNKIVLHCRENLNVFVKDFLYIMNKVLSNNNFNNDVAVVELVELAFSSICLNLDDVLCNGDMEFIQLYQSFVDLFFKIVTERIHNDDMLLKCCIDISNTNSVSSNPQLNYFVSKSVTYTISKFQERNPKFKTLSLGPVLDGNLGNLGKRLSRTQTRTVGLDKTVDDNNDISIRALQSYFNTTETDKLNLSIRTLLRCLQNTPNKELLEFICNGIPVQLRYIVILLLVRQLSDKDKNVDPVVSLKLMSSLLVSDVSIVGLSVLDIMRKLLNFQLKNVADKEVVEQSCITMTDLNHKTYYTEQTSDMLYELLLKLKSDTTKDLERNAVVEDVDYLVEHITQPSISLELFIDLAHYMRNQIISLFAIVETEVPTGFVFSKLYSLLRELDSHGVQKEMMEEIFDKYGKVALLSGLHYFLENVSEPEYTYYSYHLQAAEFLKLNDYKSQTEYKMQTKTLFTKEDLLSYYSDMGSNKYTNRGAQILMSRDNQISTSDLLSDFQVRTTSPDYRTVPNVVLPNGNSMPNNKDVTIKQSRFDKSIDDKVDEGNDTVISDANAKGSIYRFVAEDARSWKTMRVTAPKISDLKKAINERKNPNDMKRDGSVRCSQSVKSRVTNITFLLSELKNFSEDANNVKDPDEENIVGLDKIDVARSNSLRLAPISSVSDRSSIGNRRSLIQKTPVVEDQDDDFKDANEDLHSLSSRGKIFSST

SEQ ID NO: 4296 - DNA, 2349 bp, Saccharomyces pastorianus
  CDS (1)..(2349)
atgcagttgtctatgcggatgatgttcacaccaaaacatcagaaactggtcaatcaatgttatcctacgggaaggaccacagataagaagcctaaatcttcggaaacttcatatttgctatattacgttaactcgaggcgtagtaaattggagaaagttagcacttacctgattaagcgttccacttccgacttgaaccatcggcgcatagggaacatagccgttacattggatttaatgaacaaaattgtgttgcattgtaaggagaatttgaatgtatttgttaaagattttttgtacattatgaacaaagttctttccaacaacaattttaacaatgatgtatctgttgttgaattaatagaactggcatttagtagtatatgccagaacttggacgacgtcttgtgtaacggtgacatggaattcgtccagttataccagaactttgttgatcttttttttaaaatagttactgaaagaattcataatgatgacatgcttctgaaatgctgtattgatatatcaaacacaaatagtgtttcaagcaacccacaactaaaccactttgtttccaagtctgttgcctatactatttcaaagttccaagagagaaatccgaaatttaaaactttgtcgctggaagcagctctggagagcaatttaggaaaaaggctaagtcgaacacaaactcgtacaattgggttagataaggccgccgaagataatcatgacctttcagtaaaagcattgcaatcctattttaacacaactgagacagacaaattgaatttgtctattcgtactctgttgcgctgtctgcaaagtacacctaataaggaactgctagagtttgtatgcaatggtatacctgttcagttacgatatattgttatacttcttttggtcagacaactaagcgacaaggataaaaatgtaaatccaattgtttccttgaaattgatgtcgtcattacttgtttcagatgtcagtatagtggggttgagtgttcttgatataatgagaaagcttttaaatttccagttgaaaaatgcaactaataaagaagttgtggcacagtcttgtatcaccatgacagaccttaaccataaaacttattacgctgaacagacctcagatatgttatatgaactactattgaaattgaaaagtgacaccgtcaaggatgttgaaaagaatgcagttgtggaagatattgatttcctcgttgaacatattacgcagccaagtatcagtttggaattattcatcgacttggcgcattacatgaaaaaccacattatatgtttatttaacattgttgaaactgaggttccaagcagcattctcttttcaaaactgtactcattattacgtgaactggattcacatggtgtgcaaaaagaaatgatggaagagatctttgacaagtatggaaaaatggcactattatccggtttgaattattttctagagaacgtttctgagcctgagtatacctattattcgtaccatttacaagcagctaactttttaaaactcaatgactacaagtcacaaactgagtacaaaatgcaaactagaactttgtttaccaaggaagatttattgtcatactattctgatactggatcaaataaatacagcaagaagggggcgcagattttattgtctcgtgataatcaaatttctacttctgatttactgtcggactctcaagttcgtactacacctctggagtacaagaatgtccctaatgctattttttcaaatgggaaagcagtgtatgataacaacgattttgcggccaagcaaaataaattcgacaacagcatagatgacaatatagaagaagctaacgatactgtaatttctgatgctaatgcaaaaggtagtatctataggtttgttgctgaggacgcaagatcatggaaaacaatgagagccaccgcaccaaaagttagcgatttgaaaaaaacaatgaatgaaaagaatattccaaataatatgaaaagagatggctcttttcggggttctcaatcagtgaaatctcgtgtcactaatatcacatttttattaaatgaattgaaaactttttcagatgacgcgaataaaatcaaagatcctgatgaggagaatattgttggcttggataaaatcgacgttgctagatcaaattctctgcgacttgcaccaatatctagtctttctgatcgcagtagcattggaaatagaaaattctttttgcaaaaaacagcaactggtgaaaatcaaaacgatgactttaaagacgcaaatgaagatttacattctttaagttcaagaggtaaaatattctcctccacttga

SEQ ID NO: 4297 - protein, 782 aa, Saccharomyces pastorianus
MQLSMRMMFTPKHQKLVNQCYPTGRTTDKKPKSSETSYLLYYVNSRRSKLEKVSTYLIKRSTSDLNHRRIGNIAVTLDLMNKIVLHCKENLNVFVKDFLYIMNKVLSNNNFNNDVSVVELIELAFSSICQNLDDVLCNGDMEFVQLYQNFVDLFFKIVTERIHNDDMLLKCCIDISNTNSVSSNPQLNHFVSKSVAYTISKFQERNPKFKTLSLEAALESNLGKRLSRTQTRTIGLDKAAEDNHDLSVKALQSYFNTTETDKLNLSIRTLLRCLQSTPNKELLEFVCNGIPVQLRYIVILLLVRQLSDKDKNVNPIVSLKLMSSLLVSDVSIVGLSVLDIMRKLLNFQLKNATNKEVVAQSCITMTDLNHKTYYAEQTSDMLYELLLKLKSDTVKDVEKNAVVEDIDFLVEHITQPSISLELFIDLAHYMKNHIICLFNIVETEVPSSILFSKLYSLLRELDSHGVQKEMMEEIFDKYGKMALLSGLNYFLENVSEPEYTYYSYHLQAANFLKLNDYKSQTEYKMQTRTLFTKEDLLSYYSDTGSNKYSKKGAQILLSRDNQISTSDLLSDSQVRTTPLEYKNVPNAIFSNGKAVYDNNDFAAKQNKFDNSIDDNIEEANDTVISDANAKGSIYRFVAEDARSWKTMRATAPKVSDLKKTMNEKNIPNNMKRDGSFRGSQSVKSRVTNITFLLNELKTFSDDANKIKDPDEENIVGLDKIDVARSNSLRLAPISSLSDRSSIGNRKFFLQKTATGENQNDDFKDANEDLHSLSSRGKIFSST

SEQ ID NO: 4298 - DNA, 2175 bp, Ashbya gossypii
  CDS (1)..(2175)
atgggcctattgttcacgccaaagcatcagaaactggtaaaccagtgctatccgaccggtaggacgcccgacaagaaacccaagtcgtccgaaacgtcgtacctgctatactatgtgaactcgcggcgcacgaagctggagaaggttagcgcatacctggtgaagcggacggcagcggacctggcgcaccggcgaattggcaacgtgatggtgacgctggagctggctgaaaagatagtgacgagctgcaaagagaacctgaatgtgtttgtgaaggagttcctagacatcatgatcaagacactgagcaacaacaacttcaatctggatgtatgcgtggtggaggcggcggaggcagtgttcagcagcatctgccagcacctggacggggtgttgtgcaacagcgacttggagttcacgcagatgtaccgctcgtttgtggacgtgtactgccaggtggtgacggagcggctgcacaatgatgagctactgatgaaggggtgcctggacatctcgaagacggcgaacctggccgggaaccccggagtgagctctcttatctcgcggggggtggagctgacgcttgcaaagttccaggaggtgcagccgcgcttccagggcgagagtctgcaggtggacctgcactcgagcgagaagcggctgtcgcgctcgcagacgcacctgactgccgcggaggagtcgcgcgtattgggcggatacccggagcaggcgctgcagtcctacttcagcacgacagagacagacaagttgtcgattgcgatacgggcgctcatcaagcgtctgctcgaagtgccgaacaaggagctgctgcagtacattgcgaacaccattcctgtacaactccggtacatcctggtcctcgtcttcacgcacgcgttgaaccaggaggatgaacacgcagttgttcttctcaagctaatgacgactctacttgtttccgacgtcagtatcattggcctcagcgtcctggacctgttgcggaaaatcatcaatttccagctagccagtgcaacatcccctcaggtgaccgaggcctgcacaaacacgatatccgcattgaaccgcaagacttactacaaggaccagcctatcgacatgatctcagaacttcttctcaagctgaaggagcatcccggtcagcgggagaaggatatcctaatttcagacttgcaggctgtgctacaaactgtcggtcagccgtttatgacccttgagttatttctggagctggcaccctacgtaccggaccggttagagctcttcagccttgtcactgacaaactccctggcggatttgtcatgaacaagtttttcctgttcctcgtagccctggagtcgccaggcgagcaggagaagttgcttgatgatgcatttgcgaaatccaagaacttcacgctcttgtctggcctaatctatttcctagagaagggaaacacgccatcgaacttgtactactgctaccataccaaagccgcgcgcttcttagaatttgatgactaccattcacaagcccaatacaagcgacaggaacgcgaaatcttcacccgcaacgacctggttaattactactccgacccaggctgtaatcggtacgccgaaaaggggcttcggatattaatttctcagaatacacgcgtttctacgaccgacctaacggagacaccaccagaaggtgagttacagatacccgatatcccattgccgccaacaccgccgacaccacaacagcatcggatgttcttgaatagcgatgcttctgttaagtccctggacaagatgaagtcaccgaaagttagcgacctaaaacgcgctgcgcgcggtattcgcgtggcgccatcccatagctcattgcgcgcatctcagtcagtaaaatctcgtgttaccaacattacctttctgttgaacgagctgaataacgagagccaggaaacaggcatttacgatcctgaagaggaagaggttgtgggcctggagaaaacggaccttgctcgctctatctctgcaaaagtcagtcccgcaattgcctactcctccaagcgctttggtaacctaacctcgtccctcgatctcgagctgcaggaagatgcttttcaagacgcttctggcgaaatcgaagcgtccagtgcatttcgcggcaaattgttttcatcctga

SEQ ID NO: 4299 - protein, 724 aa, Ashbya gossypii
MGLLFTPKHQKLVNQCYPTGRTPDKKPKSSETSYLLYYVNSRRTKLEKVSAYLVKRTAADLAHRRIGNVMVTLELAEKIVTSCKENLNVFVKEFLDIMIKTLSNNNFNLDVCVVEAAEAVFSSICQHLDGVLCNSDLEFTQMYRSFVDVYCQVVTERLHNDELLMKGCLDISKTANLAGNPGVSSLISRGVELTLAKFQEVQPRFQGESLQVDLHSSEKRLSRSQTHLTAAEESRVLGGYPEQALQSYFSTTETDKLSIAIRALIKRLLEVPNKELLQYIANTIPVQLRYILVLVFTHALNQEDEHAVVLLKLMTTLLVSDVSIIGLSVLDLLRKIINFQLASATSPQVTEACTNTISALNRKTYYKDQPIDMISELLLKLKEHPGQREKDILISDLQAVLQTVGQPFMTLELFLELAPYVPDRLELFSLVTDKLPGGFVMNKFFLFLVALESPGEQEKLLDDAFAKSKNFTLLSGLIYFLEKGNTPSNLYYCYHTKAARFLEFDDYHSQAQYKRQEREIFTRNDLVNYYSDPGCNRYAEKGLRILISQNTRVSTTDLTETPPEGELQIPDIPLPPTPPTPQQHRMFLNSDASVKSLDKMKSPKVSDLKRAARGIRVAPSHSSLRASQSVKSRVTNITFLLNELNNESQETGIYDPEEEEVVGLEKTDLARSISAKVSPAIAYSSKRFGNLTSSLDLELQEDAFQDASGEIEASSAFRGKLFSS

SEQ ID NO: 4300 - DNA, 2250 bp, Candida glabrata
  CDS (1)..(2250)
atgcaattgggtcacatatttactccgaagcatcaaaaactggtcaatcaatgttaccctagtggtagagcgccagataagaagccaaaatcctccgagacttcatatttgatatactatgtcaattctcgttccagtaagcttgagaaagttagtaactacttaattaagagaaccaataccgatttgagtcgacgcagagttggtaacgtttgtgtaactttggagttgatggccaagatagtggatcattgtaaagaaaaccttaacgtgtttgtgaaagagtttctgactttaatgaatatggtattaaccaacaatagtataaataatgatgtcactgtgatagaattgttggaaattacttttggcaccatttgccgcaaccttgacggagcatattatggcggtgatactgaatttataaaaatgtttaagagctttgttgatcttttatttgaagttgtctcaaagaggctgaacaatgatgacttgatgttaaaggtatgcatagacatatctactataattggaattgcgagcgatcctcaattgaattatcttgtaccaaaatgtgttgagactgcaattgatcaattgcaagctagataccctcagttcaaggaaaattcactgctagaacaaccaagcttgacaaaaaggttgagcaagacacaaactcgtgcacaagaagtccttgagataccgactgcagacaatgatttatgtgttgcaacattgcataattactttaacacaacagaaacagataaattgaatttatctattagatctctaatcaaaaaattgcaatcaacaccaaataaagagctgttagagttcatttccaatgacattcctgtccagttaagatatattgttgttttattactcacaaggcaggtttccaattatgagagaaatcaagtctcaggtagccaaggcaatcctgatggtgcactcaatagtttgaaactaatttcttgtttactagtatcaaaaattagtattgtaggactgagtgttttggatataatgagaaaggttttagctgtgcagttaaaatctaaagagagcatgcctcttgtgcatcaatgtcgtgttacaataaaagatttgaataacaaaatttactactctgaacaaacatctgatatgttatatgatttggtagtcaaaataaagaatgtacaaaatgaagttgagaagagaattctggttgatgatatgaaatatattgtcgatgatatctcacagccagttattaacgttgatctattaactgagttggttccttttatgaaagggtctgttatacaactgttaaatatcactgaggagcacatttctggcggttccactttatccagattgtttcaaatggtccgtgatattgaggatagaaatttacaatccaaagcgatgtctattatctttgataaatacaagaaaattatactgctacctggtcttaattatttccagatgaacattaaagagccggagtatacctattacttatatcatttcaacgcggctaaaacattaggagttacatcatattattctgagacacagcaaaaacttgacaatggagaattatttaccaaggaagaattaatgaaatattataagaatgcaaacaacactcagtttggtgaaaagggcatgcaaattttgatgtcttatgataatcagatctctaattcagatttactaaatgataggccactatctcctgtattttcgtccaaaccgctctcatcgccaatgggtctaatatcaccacaagcacagactaatacacaattaaatcaacctatgagatttgtctccgatgatgtacactcctggaaagtttcaaggccctctatacccaaggtaagtgatttgaagaaagcaatgaaaaatggatcctctacaaaaaataaacctttaagaggttctcaatctgtgaagtcaagggttaccaatataacattcctgttaagtgaacttagaagtacaactgctggtgatgactcccacattatcgatcctgatgaagaagaagttgttggtattgataaaatggaaatagcaagatcattaagtgggagaggaagaaattctgttgttgttgaagatgtgtccactaatagagcgtcattcgttcctgcaacagtgaatgaggatgatgaatttcgtgatgctgttgaagatgttgaagcttacagcacctctagaggaaagatttttgcaaactattag

SEQ ID NO: 4301 - protein, 749 aa, Candida glabrata
MQLGHIFTPKHQKLVNQCYPSGRAPDKKPKSSETSYLIYYVNSRSSKLEKVSNYLIKRTNTDLSRRRVGNVCVTLELMAKIVDHCKENLNVFVKEFLTLMNMVLTNNSINNDVTVIELLEITFGTICRNLDGAYYGGDTEFIKMFKSFVDLLFEVVSKRLNNDDLMLKVCIDISTIIGIASDPQLNYLVPKCVETAIDQLQARYPQFKENSLLEQPSLTKRLSKTQTRAQEVLEIPTADNDLCVATLHNYFNTTETDKLNLSIRSLIKKLQSTPNKELLEFISNDIPVQLRYIVVLLLTRQVSNYERNQVSGSQGNPDGALNSLKLISCLLVSKISIVGLSVLDIMRKVLAVQLKSKESMPLVHQCRVTIKDLNNKIYYSEQTSDMLYDLVVKIKNVQNEVEKRILVDDMKYIVDDISQPVINVDLLTELVPFMKGSVIQLLNITEEHISGGSTLSRLFQMVRDIEDRNLQSKAMSIIFDKYKKIILLPGLNYFQMNIKEPEYTYYLYHFNAAKTLGVTSYYSETQQKLDNGELFTKEELMKYYKNANNTQFGEKGMQILMSYDNQISNSDLLNDRPLSPVFSSKPLSSPMGLISPQAQTNTQLNQPMRFVSDDVHSWKVSRPSIPKVSDLKKAMKNGSSTKNKPLRGSQSVKSRVTNITFLLSELRSTTAGDDSHIIDPDEEEVVGIDKMEIARSLSGRGRNSVVVEDVSTNRASFVPATVNEDDEFRDAVEDVEAYSTSRGKIFANY

SEQ ID NO: 4302 - DNA, 2193 bp, Kluyveromyces lactis
  CDS (1)..(2193)
atgggctttctcttcacccctaagcaccagaaattggtgaatcagtgttatccaccaggccgaactcccgataagaagccaaaagggtcagagacttcgtacttgttatattatgttaattcgagacgtccaaaattggaaaaggtcagcagttaccttgtgaagaggtcgacaacggatttgaacagaagacgttccggtaatgtctctgtcactctagagctactggctaaaatcgtcgagaattgtaatgaaaacatgaatattttcatcaaagatttcatccacattatgactttagtgttgaacaacaacaattttaacaatgatccaactattgttggtttgattgaaagagttttagaagctatttgtaaccatttggatgggtctcttgtaagtggggactctgagtttttagaattgttcaaaaacttcgtaaccctgtacttcaaagttgctaacactaaacttaatgacacagatttggttttgaaaggttgcttagacttttcaaagatctcaaacttgggaagcattcaccaatggtctgctacagccaaaaactgcgtttctattgcattaacgaagttccaagaaaggcatccaatatatagtgaggctaccattgactcttcattttctgaaccaggttctccagcgttgaagaagaaactcactagaacacaaactaaagtgatgggtctagatgatgtttcgaacacaggggattattcaattctggctttgaatacttttttcaataccacagaaacagataagttgacaatcggtttacatgcactaatcgaacatttattagagactccgaacaaggaattattgcaatttatctgcaatggtattccggttcagttgagatacattgttatccttttattcgtaaggccgttgggaactagctccgagaaaaacatgttattgatcttaaaactaatatccagtctattaacttcagctgtcagtatcataggtttatcagtgattgatatcttgagaagactaatcactgttcagctagcaaaatcggattcaactactgtagttaaacagattgctgtgacgattaaagatttaaatcgcaaaacatactacaaacagcaatcatctgatatgtttgccgaattgagttttaaatttatcgaaagcggaaagccacatcaccttgaattattccagctagatttggactccttgatatctgttactagtgaccaatgtctagatcttgatttatttggcgagtttttgccatatgtcactgacaaaacgcagttatcaaaacttttgtatccagaagctccacatcaagttatctttatcagattctttgagaaagtatctactttatcaaaacaagatactgaaattgccatatcaacctcttttgcatattataaagcagcctctcttctttcaggtttggcctactatgtcaacaacaatcgaccttcagacggttactatgcctatcatcatcatgcttcaaagtttctaggactagcagattaccaaactcaagttgagtttaaaagaaaagacaatgacatcttcaccaaggaagacttgttgaattactactcagatgcaggttccaatatctactcagagaagggtagagacattctattggttgatcattctgaccaaaatggtactgatatcgatcaggacacggttcgatactcaacaccaatcccgttgccacaaattagcatacccccaaccactacaaatggcattggcataaaaaaatcatcgccagctaatgatacatacgttacaagatctctgaaacataatcccgttccgaacgtaaaagacttgaagaatttggtctcttctaaaaaagataaaagtaatacaaaaacgttacgtggttcacaatcggtgaaatcaaaagtcacaaacataacattcctattagatgaattaaagaacgatggcgatgaaattaaaattgccgacccagatgaagaagacattattggaatggaaaaacaagatcttgcaagatcttattccttaagaatgaataccatcagtagcacgaattccaggacattaataccgtcagtagaaaatgcagaggaacatggtgatgatttcagagatgctcatgaagatatagaggtctcatcttctaccagaggtaggttatttatggtctaa

SEQ ID NO: 4303 - protein, 730 aa, Kluyveromyces lactis
MGFLFTPKHQKLVNQCYPPGRTPDKKPKGSETSYLLYYVNSRRPKLEKVSSYLVKRSTTDLNRRRSGNVSVTLELLAKIVENCNENMNIFIKDFIHIMTLVLNNNNFNNDPTIVGLIERVLEAICNHLDGSLVSGDSEFLELFKNFVTLYFKVANTKLNDTDLVLKGCLDFSKISNLGSIHQWSATAKNCVSIALTKFQERHPIYSEATIDSSFSEPGSPALKKKLTRTQTKVMGLDDVSNTGDYSILALNTFFNTTETDKLTIGLHALIEHLLETPNKELLQFICNGIPVQLRYIVILLFVRPLGTSSEKNMLLILKLISSLLTSAVSIIGLSVIDILRRLITVQLAKSDSTTVVKQIAVTIKDLNRKTYYKQQSSDMFAELSFKFIESGKPHHLELFQLDLDSLISVTSDQCLDLDLFGEFLPYVTDKTQLSKLLYPEAPHQVIFIRFFEKVSTLSKQDTEIAISTSFAYYKAASLLSGLAYYVNNNRPSDGYYAYHHHASKFLGLADYQTQVEFKRKDNDIFTKEDLLNYYSDAGSNIYSEKGRDILLVDHSDQNGTDIDQDTVRYSTPIPLPQISIPPTTTNGIGIKKSSPANDTYVTRSLKHNPVPNVKDLKNLVSSKKDKSNTKTLRGSQSVKSKVTNITFLLDELKNDGDEIKIADPDEEDIIGMEKQDLARSYSLRMNTISSTNSRTLIPSVENAEEHGDDFRDAHEDIEVSSSTRGRLFMV

SEQ ID NO: 4304 - DNA, 24 bp, Artificial sequence
  primer
atgcagttgtctatgcggatgatg

SEQ ID NO: 4305 - DNA, 25 bp, Artificial sequence
  primer
tcaagtggaggagaaaattttacct

SEQ ID NO: 4306 - protein, 790 aa, Artificial sequence
  consensus sequence
  Variant (2)..(4): Xaa in position 2 to 4 is any amino acid
  Variant (19)..(19): Xaa in position 19 is any amino acid
  Variant (23)..(23): Xaa in position 23 is any amino acid
  Variant (44)..(44): Xaa in position 44 is any amino acid
  Variant (51)..(51): Xaa in position 51 is any amino acid
  Variant (54)..(54): Xaa in position 54 is any amino acid
  Variant (57)..(59): Xaa in position 57 to 59 is any amino acid
  Variant (62)..(63): Xaa in position 62 to 63 is any amino acid
  Variant (66)..(66): Xaa in position 66 is any amino acid
  Variant (69)..(70): Xaa in position 69 to 70 is any amino acid
  Variant (74)..(74): Xaa in position 74 is any amino acid
  Variant (76)..(77): Xaa in position 76 to 77 is any amino acid
  Variant (81)..(82): Xaa in position 81 to 82 is any amino acid
  Variant (84)..(84): Xaa in position 84 is any amino acid
  Variant (93)..(93): Xaa in position 93 is any amino acid
  Variant (96)..(96): Xaa in position 96 is any amino acid
  Variant (99)..(100): Xaa in position 99 to 100 is any amino acid
  Variant (103)..(103): Xaa in position 103 is any amino acid
  Variant (112)..(112): Xaa in position 112 is any amino acid
  Variant (117)..(117): Xaa in position 117 is any amino acid
  Variant (119)..(120): Xaa in position 119 to 120 is any amino acid
  Variant (122)..(123): Xaa in position 122 to 123 is any amino acid
  Variant (126)..(127): Xaa in position 126 to 127 is any amino acid
  Variant (130)..(131): Xaa in position 130 to 131 is any amino acid
  Variant (133)..(134): Xaa in position 133 to 134 is any amino acid
  Variant (137)..(137): Xaa in position 137 is any amino acid
  Variant (140)..(145): Xaa in position 140 to 145 is any amino acid
  Variant (150)..(150): Xaa in position 150 is any amino acid
  Variant (152)..(153): Xaa in position 152 to 153 is any amino acid
  Variant (155)..(156): Xaa in position 155 to 156 is any amino acid
  Variant (158)..(159): Xaa in position 158 to 159 is any amino acid
  Variant (163)..(164): Xaa in position 163 to 164 is any amino acid
  Variant (167)..(167): Xaa in position 167 is any amino acid
  Variant (169)..(169): Xaa in position 169 is any amino acid
  Variant (173)..(178): Xaa in position 173 to 178 is any amino acid
  Variant (180)..(180): Xaa in position 180 is any amino acid
  Variant (183)..(190): Xaa in position 183 to 190 is any amino acid
  Variant (192)..(196): Xaa in position 192 to 196 is any amino acid
  Variant (202)..(202): Xaa in position 202 is any amino acid
  Variant (204)..(204): Xaa in position 204 is any amino acid
  Variant (206)..(208): Xaa in position 206 to 208 is any amino acid
  Variant (211)..(217): Xaa in position 211 to 217 is any amino acid
  Variant (218)..(223): Xaa in position 218 to 223 is any or no amino acid
  Variant (232)..(243): Xaa in position 232 to 243 is any amino acid
  Variant (244)..(244): Xaa in position 244 is any or no amino acid
  Variant (246)..(249): Xaa in position 246 to 249 is any amino acid
  Variant (252)..(253): Xaa in position 252 to 253 is any amino acid
  Variant (264)..(266): Xaa in position 264 to 266 is any amino acid
  Variant (269)..(269): Xaa in position 269 is any amino acid
  Variant (271)..(273): Xaa in position 271 to 273 is any amino acid
  Variant (275)..(276): Xaa in position 275 to 276 is any amino acid
  Variant (284)..(284): Xaa in position 284 is any amino acid
  Variant (286)..(287): Xaa in position 286 to 287 is any amino acid
  Variant (289)..(289): Xaa in position 289 is any amino acid
  Variant (299)..(299): Xaa in position 299 is any amino acid
  Variant (302)..(303): Xaa in position 302 to 303 is any amino acid
  Variant (305)..(305): Xaa in position 305 is any amino acid
  Variant (307)..(316): Xaa in position 307 to 316 is any amino acid
  Variant (317)..(327): Xaa in position 317 to 327 is any or no amino acid
  Variant (331)..(331): Xaa in position 331 is any amino acid
  Variant (333)..(333): Xaa in position 333 is any amino acid
  Variant (338)..(338): Xaa in position 338 is any amino acid
  Variant (342)..(342): Xaa in position 342 is any amino acid
  Variant (350)..(350): Xaa in position 350 is any amino acid
  Variant (353)..(356): Xaa in position 353 to 356 is any amino acid
  Variant (359)..(365): Xaa in position 359 to 365 is any amino acid
  Variant (368)..(368): Xaa in position 368 is any amino acid
  Variant (370)..(372): Xaa in position 370 to 372 is any amino acid
  Variant (374)..(375): Xaa in position 374 to 375 is any amino acid
  Variant (379)..(379): Xaa in position 379 is any amino acid
  Variant (384)..(385): Xaa in position 384 to 385 is any amino acid
  Variant (387)..(387): Xaa in position 387 is any amino acid
  Variant (391)..(392): Xaa in position 391 to 392 is any amino acid
  Variant (395)..(396): Xaa in position 395 to 396 is any amino acid
  Variant (398)..(398): Xaa in position 398 is any amino acid
  Variant (400)..(405): Xaa in position 400 to 405 is any amino acid
  Variant (406)..(406): Xaa in position 406 is any or no amino acid
  Variant (408)..(413): Xaa in position 408 to 413 is any amino acid
  Variant (415)..(423): Xaa in position 415 to 423 is any amino acid
  Variant (426)..(428): Xaa in position 426 to 428 is any amino acid
  Variant (430)..(430): Xaa in position 430 is any amino acid
  Variant (433)..(434): Xaa in position 433 to 434 is any amino acid
  Variant (436)..(437): Xaa in position 436 to 437 is any amino acid
  Variant (439)..(444): Xaa in position 439 to 444 is any amino acid
  Variant (445)..(445): Xaa in position 445 is any or no amino acid
  Variant (447)..(454): Xaa in position 447 to 454 is any amino acid
  Variant (456)..(469): Xaa in position 456 to 469 is any amino acid
  Variant (471)..(474): Xaa in position 471 to 474 is any amino acid
  Variant (475)..(475): Xaa in position 475 is any or no amino acid
  Variant (477)..(483): Xaa in position 477 to 483 is any amino acid
  Variant (485)..(485): Xaa in position 485 is any amino acid
  Variant (488)..(491): Xaa in position 488 to 491 is any amino acid
  Variant (497)..(497): Xaa in position 497 is any amino acid
  Variant (500)..(501): Xaa in position 500 to 501 is any amino acid
  Variant (503)..(504): Xaa in position 503 to 504 is any amino acid
  Variant (505)..(505): Xaa in position 505 is any or no amino acid
  Variant (507)..(509): Xaa in position 507 to 509 is any amino acid
  Variant (512)..(512): Xaa in position 512 is any amino acid
  Variant (515)..(516): Xaa in position 515 to 516 is any amino acid
  Variant (519)..(519): Xaa in position 519 is any amino acid
  Variant (522)..(524): Xaa in position 522 to 524 is any amino acid
  Variant (527)..(527): Xaa in position 527 is any amino acid
  Variant (530)..(532): Xaa in position 530 to 532 is any amino acid
  Variant (534)..(539): Xaa in position 534 to 539 is any amino acid
  Variant (546)..(547): Xaa in position 546 to 547 is any amino acid
  Variant (552)..(552): Xaa in position 552 is any amino acid
  Variant (554)..(554): Xaa in position 554 is any amino acid
  Variant (556)..(556): Xaa in position 556 is any amino acid
  Variant (558)..(559): Xaa in position 558 to 559 is any amino acid
  Variant (562)..(563): Xaa in position 562 to 563 is any amino acid
  Variant (566)..(566): Xaa in position 566 is any amino acid
  Variant (568)..(572): Xaa in position 568 to 572 is any amino acid
  Variant (574)..(575): Xaa in position 574 to 575 is any amino acid
  Variant (578)..(579): Xaa in position 578 to 579 is any amino acid
  Variant (581)..(608): Xaa in position 581 to 608 is any amino acid
  Variant (609)..(634): Xaa in position 609 to 634 is any or no amino acid
  Variant (636)..(640): Xaa in position 636 to 640 is any amino acid
  Variant (642)..(647): Xaa in position 642 to 647 is any amino acid
  Variant (648)..(660): Xaa in position 648 to 660 is any or no amino acid
  Variant (668)..(681): Xaa in position 668 to 681 is any amino acid
  Variant (682)..(685): Xaa in position 682 to 685 is any or no amino acid
  Variant (687)..(687): Xaa in position 687 is any amino acid
  Variant (703)..(703): Xaa in position 703 is any amino acid
  Variant (706)..(713): Xaa in position 706 to 713 is any amino acid
  Variant (714)..(715): Xaa in position 714 to 715 is any or no amino acid
  Variant (717)..(717): Xaa in position 717 is any amino acid
  Variant (723)..(724): Xaa in position 723 to 724 is any amino acid
  Variant (727)..(728): Xaa in position 727 to 728 is any amino acid
  Variant (730)..(730): Xaa in position 730 is any amino acid
  Variant (732)..(732): Xaa in position 732 is any amino acid
  Variant (736)..(736): Xaa in position 736 is any amino acid
  Variant (738)..(738): Xaa in position 738 is any amino acid
  Variant (740)..(758): Xaa in position 740 to 758 is any amino acid
  Variant (759)..(765): Xaa in position 759 to 765 is any or no amino acid
  Variant (767)..(769): Xaa in position 767 to 769 is any amino acid
  Variant (771)..(771): Xaa in position 771 is any amino acid
  Variant (773)..(773): Xaa in position 773 is any amino acid
  Variant (776)..(776): Xaa in position 776 is any amino acid
  Variant (779)..(782): Xaa in position 779 to 782 is any amino acid
  Variant (784)..(784): Xaa in position 784 is any amino acid
  Variant (785)..(785): Xaa in position 785 is any or no amino acid
  Variant (789)..(789): Xaa in position 789 is any amino acid
MXXXFTPKHQKLVNQCYPXGRTXDKKPKSSETSYLLYYVNSRRXKLEKVSXYLXKRXXXDLXXRRXGNXXVTLXLXXKIVXXCXENLNVFVKXFLXIMXXVLXNNNFNNDVXVVELXEXXFXXICXXLDXXLXXGDXEFXXXXXXFVDLXFXXVXXRXXNDDXXLKXCXDISXXXXXXSXPQXXXXXXXXVXXXXXKFQERXPXFXXXSLXXXXXXXXXXXXXKRLSRTQTXXXXXXXXXXXXXDXXXXALXXYFNTTETDKLXXXIRXLXXXLXXTPNKELLXFXXNXIPVQLRYIVXLLXXRXLXXXXXXXXXXXXXXXXXXXXXLKLXSXLLVSXVSIXGLSVLDIXRKXXXXQLXXXXXXXVVXQXXXTXXDLNXKTYYXXQXSDMXXELXXKXKXXXXXXXEXXXXXXDXXXXXXXXXQPXXXLXLFXXLXXYXXXXXXXLXXXXXXXXPXXXXXXXXXXXXXXLXXXXXQXXXXXXXFXKYXXXXLLSGLXYFXXNXXXPXXXYYXYHXXAAXFLXXXDYXSQXXXKXXXXXXFTKEDLXXYYSDXGXNXYXXKGXXILXSXXXXXSXXDLXXDXXXXXXXXXXXXXXXXXXXXXXXXXXXXXXXXXXXXXXXXXXXXXXXXXXXXXXDXXXXXSXXXXXXXXXXXXXXXXXXXPKVSDLKXXXXXXXXXXXXXXXXXXRXSQSVKSRVTNITFLLXELXXXXXXXXXXIXDPDEEXXVGXXKXDXARSXSXRXXXXXXXXXXXXXXXXXXXXXXXXXXEXXXDXFXDAXEDXXXXSXXRGKXF

SEQ ID NO: 4307 - protein, 57 aa, Artificial sequence
  protein pattern
  Variant (12)..(12): Xaa in position 12 is Pro or Thr
  Variant (16)..(16): Xaa in position 16 is Pro or Thr
  Variant (22)..(22): Xaa in position 22 is Gly or Ser
  Variant (37)..(37): Xaa in position 37 is Pro, Ser or Thr
  Variant (44)..(44): Xaa in position 44 is Ala, Ser or Thr
  Variant (47)..(47): Xaa in position 47 is Ile or Val
  Variant (50)..(50): Xaa in position 50 is Ser or Thr
  Variant (51)..(51): Xaa in position 51 is Ala or Thr
  Variant (52)..(52): Xaa in position 52 is Ala, Ser or Thr
  Variant (55)..(55): Xaa in position 55 is Ala or Asn
  Variant (56)..(56): Xaa in position 56 is His or Arg
KHQKLVNQCYPXGRTXDKKPKXSETSYLLYYVNSRRXKLEKVSXYLXKRXXXDLXXR

SEQ ID NO: 4308 - protein, 58 aa, Artificial sequence
  protein pattern
  Variant (2)..(4): Xaa in position 2 to 4 is any amino acid
  Variant (5)..(6): Xaa in position 5 to 6 is any or no amino acid
  Variant (16)..(16): Xaa in position 16 is Asn or Thr
  Variant (17)..(17): Xaa in position 17 is Ile or Leu
  Variant (18)..(18): Xaa in position 18 is Gly or Ser
  Variant (19)..(19): Xaa in position 19 is Ile or Leu
  Variant (20)..(20): Xaa in position 20 is His or Arg
  Variant (21)..(21): Xaa in position 21 is Ala, Ser or Thr
  Variant (23)..(23): Xaa in position 23 is Ile or Leu
  Variant (24)..(24): Xaa in position 24 is Glu, Lys or Arg
  Variant (25)..(25): Xaa in position 25 is any amino acid
  Variant (27)..(27): Xaa in position 27 is any amino acid
  Variant (28)..(28): Xaa in position 28 is Glu, Asn or Ser
  Variant (36)..(36): Xaa in position 36 is Glu or Gln
  Variant (38)..(38): Xaa in position 38 is Ile or Val
  Variant (39)..(39): Xaa in position 39 is Cys or Ser
  Variant (41)..(41): Xaa in position 41 is Asp or Gly
  Variant (51)..(51): Xaa in position 51 is Ile or Val
  Variant (54)..(54): Xaa in position 54 is Phe or Leu
  Variant (55)..(55): Xaa in position 55 is Thr or Val
  Variant (57)..(57): Xaa in position 57 is Pro or Gln
  Variant (58)..(58): Xaa in position 58 is Leu or Val
LXXXXXFNTTETDKLXXXXXXLXXXLXXTPNKELLXFXXNXIPVQLRYIVXLLXXRXX

SEQ ID NO: 4309 - protein, 58 aa, Artificial sequence
  protein pattern
  Variant (2)..(2): Xaa in position 2 is Ile or Val
  Variant (3)..(3): Xaa in position 3 is any amino acid
  Variant (7)..(7): Xaa in position 7 is Asp or Glu
  Variant (9)..(9): Xaa in position 9 is any amino acid
  Variant (10)..(10): Xaa in position 10 is Ala, Glu or Asn
  Variant (14)..(15): Xaa in position 14 to 15 is any amino acid
  Variant (17)..(17): Xaa in position 17 is Lys or Arg
  Variant (26)..(26): Xaa in position 26 is Asp or Glu
  Variant (29)..(29): Xaa in position 29 is any amino acid
  Variant (30)..(30): Xaa in position 30 is Ile or Leu
  Variant (32)..(33): Xaa in position 32 to 33 is any amino acid
  Variant (34)..(34): Xaa in position 34 is Thr or Val
  Variant (36)..(36): Xaa in position 36 is Ser or Thr
  Variant (39)..(39): Xaa in position 39 is Asn or Ser
  Variant (40)..(40): Xaa in position 40 is Phe or Ile
  Variant (42)..(42): Xaa in position 42 is any amino acid
  Variant (45)..(45): Xaa in position 45 is Ala, Cys, Ser or Thr
  Variant (47)..(47): Xaa in position 47 is Ile or Val
  Variant (49)..(49): Xaa in position 49 is Ala or Leu
  Variant (50)..(50): Xaa in position 50 is Ala, Ile, Leu or Val
  Variant (52)..(52): Xaa in position 52 is Ala, Ile or Leu
  Variant (53)..(53): Xaa in position 53 is Ala, Thr or Val
  Variant (55)..(55): Xaa in position 55 is Gly or Ser
  Variant (56)..(56): Xaa in position 56 is Ser or Thr
NXXVTLXLXXKIVXXCXENLNVFVKXFLXXMXXXLXNNXXNXDVXVXEXXEXXFXXIC

SEQ ID NO: 4310 - protein, 59 aa, Artificial sequence
  protein pattern
  Variant (2)..(2): Xaa in position 2 is any amino acid
  Variant (3)..(7): Xaa in position 3 to 7 is any or no amino acid
  Variant (9)..(10): Xaa in position 9 to 10 is any amino acid
  Variant (12)..(12): Xaa in position 12 is Ala or Ser
  Variant (13)..(13): Xaa in position 13 is any amino acid
  Variant (16)..(16): Xaa in position 16 is any amino acid
  Variant (17)..(17): Xaa in position 17 is Phe or Leu
  Variant (18)..(18): Xaa in position 18 is Ala, Asp or Asn
  Variant (21)..(21): Xaa in position 21 is any amino acid
  Variant (22)..(22): Xaa in position 22 is Ser or Thr
  Variant (24)..(24): Xaa in position 24 is Ala, Thr or Val
  Variant (25)..(25): Xaa in position 25 is Glu or Gln
  Variant (26)..(26): Xaa in position 26 is Phe or Tyr
  Variant (28)..(29): Xaa in position 28 to 29 is any amino acid
  Variant (30)..(30): Xaa in position 30 is Asp, Glu or Thr
  Variant (31)..(31): Xaa in position 31 is any amino acid
  Variant (32)..(32): Xaa in position 32 is Asp, Glu or Thr
  Variant (33)..(33): Xaa in position 33 is Ile or Leu
  Variant (36)..(36): Xaa in position 36 is Lys or Arg
  Variant (37)..(37): Xaa in position 37 is Glu or Asn
  Variant (40)..(40): Xaa in position 40 is Leu or Val
  Variant (41)..(41): Xaa in position 41 is Asn or Ser
  Variant (46)..(46): Xaa in position 46 is any amino acid
  Variant (48)..(48): Xaa in position 48 is Cys or Ser
  Variant (50)..(50): Xaa in position 50 is any amino acid
  Variant (52)..(52): Xaa in position 52 is Ala, Ser or Thr
  Variant (53)..(53): Xaa in position 53 is any amino acid
  Variant (54)..(54): Xaa in position 54 is Lys or Arg
  Variant (56)..(56): Xaa in position 56 is any amino acid
  Variant (57)..(57): Xaa in position 57 is Asp, Gln or Arg
SXXXXXXHXXAXXFLXXXDYXXQXXXKXXXXXXFTXXDLXXYYSDXGXNXYXXXGXXIL

SEQ ID NO: 4311 - protein, 57 aa, Artificial sequence
  protein pattern
  Variant (2)..(5): Xaa in position 2 to 5 is any amino acid
  Variant (9)..(9): Xaa in position 9 is Ile or Val
  Variant (14)..(14): Xaa in position 14 is Ile or Leu
  Variant (16)..(16): Xaa in position 16 is Ile or Leu
  Variant (17)..(17): Xaa in position 17 is Leu or Met
  Variant (19)..(19): Xaa in position 19 is Lys or Arg
  Variant (20)..(21): Xaa in position 20 to 21 is Ile or Leu
  Variant (22)..(22): Xaa in position 22 is Asn or Thr
  Variant (23)..(23): Xaa in position 23 is Phe or Val
  Variant (26)..(27): Xaa in position 26 to 27 is any amino acid
  Variant (28)..(28): Xaa in position 28 is Ala, Ser or Val
  Variant (29)..(29): Xaa in position 29 is Ala, Asp or Thr
  Variant (30)..(30): Xaa in position 30 is Asp, Asn or Ser
  Variant (31)..(31): Xaa in position 31 is any amino acid
  Variant (32)..(32): Xaa in position 32 is Glu, Gln or Thr
  Variant (34)..(34): Xaa in position 34 is Thr or Val
  Variant (35)..(35): Xaa in position 35 is any amino acid
  Variant (36)..(36): Xaa in position 36 is Ala or Gln
  Variant (37)..(37): Xaa in position 37 is any amino acid
  Variant (38)..(38): Xaa in position 38 is Ala, Cys or Thr
  Variant (39)..(39): Xaa in position 39 is any amino acid
  Variant (41)..(41): Xaa in position 41 is Ile or Met
  Variant (42)..(42): Xaa in position 42 is any amino acid
  Variant (43)..(43): Xaa in position 43 is Ala or Asp
  Variant (46)..(46): Xaa in position 46 is His or Arg
  Variant (51)..(51): Xaa in position 51 is any amino acid
  Variant (52)..(52): Xaa in position 52 is Asp, Glu or Gln
  Variant (54)..(54): Xaa in position 54 is Pro, Ser or Thr
  Variant (55)..(55): Xaa in position 55 is any amino acid
LXXXXVSIXGLSVXDXXRXXXXXQLXXXXXXXVXXXXXXTXXXLNXKTYYXXQXXDM

SEQ ID NO: 4312 - protein, 51 aa, Artificial sequence
  protein pattern
  Variant (2)..(2): Xaa in position 2 is any amino acid
  Variant (5)..(6): Xaa in position 5 to 6 is any amino acid
  Variant (7)..(7): Xaa in position 7 is Leu or Met
  Variant (8)..(8): Xaa in position 8 is Phe or Tyr
  Variant (9)..(9): Xaa in position 9 is any amino acid
  Variant (10)..(10): Xaa in position 10 is Asn or Ser
  Variant (14)..(14): Xaa in position 14 is Leu or Val
  Variant (15)..(17): Xaa in position 15 to 17 is any amino acid
  Variant (18)..(18): Xaa in position 18 is Ile or Val
  Variant (20)..(20): Xaa in position 20 is Ser or Thr
  Variant (21)..(21): Xaa in position 21 is Glu or Lys
  Variant (23)..(23): Xaa in position 23 is Ile or Leu
  Variant (24)..(24): Xaa in position 24 is any amino acid
  Variant (27)..(27): Xaa in position 27 is Asp or Glu
  Variant (28)..(30): Xaa in position 28 to 30 is Leu or Met
  Variant (32)..(32): Xaa in position 32 is Cys, Gly or Val
  Variant (34)..(34): Xaa in position 34 is Ile or Leu
  Variant (38)..(40): Xaa in position 38 to 40 is any amino acid
  Variant (41)..(41): Xaa in position 41 is Gly, Asn or Ser
  Variant (42)..(42): Xaa in position 42 is Ile, Leu or Val
  Variant (43)..(43): Xaa in position 43 is Ala or Ser
  Variant (44)..(44): Xaa in position 44 is Gly or Ser
  Variant (45)..(45): Xaa in position 45 is Asp or Asn
  Variant (47)..(47): Xaa in position 47 is Gly or Gln
  Variant (48)..(48): Xaa in position 48 is Leu or Val
  Variant (49)..(49): Xaa in position 49 is Asn or Ser
  Variant (50)..(50): Xaa in position 50 is any amino acid
  Variant (51)..(51): Xaa in position 51 is Phe or Leu
DXEFXXXXXXFVDXXXXXVXXRXXNDXXXXKXCXDISXXXXXXXXPXXXXX

SEQ ID NO: 4313 - protein, 26 aa, Artificial sequence
  protein pattern
  Variant (2)..(2): Xaa in position 2 is Ala, Cys or Gly
  Variant (18)..(18): Xaa in position 18 is Asn or Ser
  Variant (21)..(21): Xaa in position 21 is any amino acid
  Variant (22)..(23): Xaa in position 22 to 23 is any or no amino acid
  Variant (25)..(25): Xaa in position 25 is Asp, Glu, Gln or Thr
  Variant (26)..(26): Xaa in position 26 is Asp, Glu or Thr
RXSQSVKSRVTNITFLLXELXXXSXX

SEQ ID NO: 4314 - protein, 25 aa, Artificial sequence
  protein pattern
  Variant (6)..(6): Xaa in position 6 is Asp, Glu or Asn
  Variant (7)..(8): Xaa in position 7 to 8 is Ile or Val
  Variant (10)..(10): Xaa in position 10 is Ile, Leu or Met
  Variant (11)..(11): Xaa in position 11 is Asp or Glu
  Variant (13)..(13): Xaa in position 13 is any amino acid
  Variant (14)..(14): Xaa in position 14 is Asp or Glu
  Variant (15)..(15): Xaa in position 15 is Ile, Leu or Val
  Variant (19)..(19): Xaa in position 19 is any amino acid
  Variant (21)..(21): Xaa in position 21 is Gly or Leu
  Variant (23)..(24): Xaa in position 23 to 24 is any amino acid
  Variant (25)..(25): Xaa in position 25 is Asn, Pro or Thr
DPDEEXXXGXXKXXXARSXSXRXXX

SEQ ID NO: 4315 - protein, 28 aa, Artificial sequence
  protein pattern
  Variant (2)..(3): Xaa in position 2 to 3 is any or no amino acid
  Variant (5)..(9): Xaa in position 5 to 9 is any amino acid
  Variant (10)..(10): Xaa in position 10 is any or no amino acid
  Variant (12)..(12): Xaa in position 12 is Ala or Asp
  Variant (13)..(17): Xaa in position 13 to 17 is any amino acid
  Variant (18)..(18): Xaa in position 18 is Ala, Ser or Thr
  Variant (24)..(24): Xaa in position 24 is any amino acid
  Variant (26)..(26): Xaa in position 26 is Phe or Tyr
  Variant (27)..(27): Xaa in position 27 is Leu or Val
  Variant (28)..(28): Xaa in position 28 is Glu or Asn
QXXEXXXXXXFXXXXXXXLLSGLXYXXX

SEQ ID NO: 4316 - protein, 26 aa, Artificial sequence
  protein pattern
  Variant (2)..(2): Xaa in position 2 is Leu or Val
  Variant (3)..(3): Xaa in position 3 is Ala, Asn or Ser
  Variant (4)..(4): Xaa in position 4 is Asp, Glu or Ser
  Variant (6)..(6): Xaa in position 6 is any amino acid
  Variant (7)..(7): Xaa in position 7 is any or no amino acid
  Variant (9)..(9): Xaa in position 9 is any amino acid
  Variant (11)..(16): Xaa in position 11 to 16 is any amino acid
  Variant (17)..(17): Xaa in position 17 is any or no amino acid
  Variant (20)..(20): Xaa in position 20 is Ile or Val
  Variant (25)..(25): Xaa in position 25 is Lys or Arg
  Variant (26)..(26): Xaa in position 26 is Ala or Thr
FXXXDXXSXKXXXXXXXPKXSDLKXX

SEQ ID NO: 4317 - protein, 38 aa, Artificial sequence
  protein pattern
  Variant (2)..(2): Xaa in position 2 is Lys or Arg
  Variant (3)..(3): Xaa in position 3 is Asp, Asn or Arg
  Variant (4)..(4): Xaa in position 4 is Ala or Ile
  Variant (5)..(5): Xaa in position 5 is Leu or Val
  Variant (6)..(6): Xaa in position 6 is Ile or Val
  Variant (7)..(7): Xaa in position 7 is Asp, Glu or Ser
  Variant (9)..(11): Xaa in position 9 to 11 is any amino acid
  Variant (12)..(12): Xaa in position 12 is any or no amino acid
  Variant (14)..(17): Xaa in position 14 to 17 is any amino acid
  Variant (18)..(18): Xaa in position 18 is any or no amino acid
  Variant (21)..(21): Xaa in position 21 is any amino acid
  Variant (22)..(22): Xaa in position 22 is Ile or Met
  Variant (23)..(23): Xaa in position 23 is Asn, Ser or Thr
  Variant (24)..(24): Xaa in position 24 is Leu or Val
  Variant (25)..(25): Xaa in position 25 is Asp or Glu
  Variant (27)..(27): Xaa in position 27 is Phe or Leu
  Variant (28)..(28): Xaa in position 28 is any amino acid
  Variant (29)..(29): Xaa in position 29 is Asp or Glu
  Variant (31)..(31): Xaa in position 31 is Ala or Val
  Variant (32)..(32): Xaa in position 32 is any amino acid
  Variant (33)..(33): Xaa in position 33 is Phe or Tyr
  Variant (34)..(34): Xaa in position 34 is Met or Val
  Variant (35)..(35): Xaa in position 35 is any amino acid
  Variant (36)..(36): Xaa in position 36 is Asp, Gly or Asn
  Variant (37)..(37): Xaa in position 37 is any amino acid
  Variant (38)..(38): Xaa in position 38 is Ile, Leu or Val
EXXXXXXDXXXXVXXXXXQPXXXXXLXXXLXXXXXXXX

SEQ ID NO: 4318 - protein, 14 aa, Artificial sequence
  protein pattern
  Variant (2)..(2): Xaa in position 2 is Ala, Glu, Ser or Thr
  Variant (3)..(3): Xaa in position 3 is any amino acid
  Variant (4)..(4): Xaa in position 4 is Ala or Thr
  Variant (5)..(5): Xaa in position 5 is Ile or Leu
  Variant (6)..(6): Xaa in position 6 is Ala, Ser or Thr
  Variant (11)..(13): Xaa in position 11 to 13 is any or no amino acid
VXXXXXKFQEXXXR

SEQ ID NO: 4319 - protein, 12 aa, Artificial sequence
  protein pattern
  Variant (3)..(3): Xaa in position 3 is any or no amino acid
  Variant (5)..(5): Xaa in position 5 is Lys or Arg
  Variant (8)..(8): Xaa in position 8 is any amino acid
  Variant (11)..(11): Xaa in position 11 is Ile, Leu or Val
  Variant (12)..(12): Xaa in position 12 is Glu or His
DDXFXDAXEDXX

SEQ ID NO: 4320 - protein, 17 aa, Artificial sequence
  protein pattern
  Variant (2)..(2): Xaa in position 2 is any amino acid
  Variant (4)..(4): Xaa in position 4 is Lys or Arg
  Variant (6)..(6): Xaa in position 6 is Ser or Thr
  Variant (7)..(7): Xaa in position 7 is Lys or Arg
  Variant (11)..(11): Xaa in position 11 is Lys or Arg
  Variant (12)..(12): Xaa in position 12 is Ala, Thr or Val
  Variant (13)..(13): Xaa in position 13 is any amino acid
  Variant (14)..(14): Xaa in position 14 is Glu or Gly
  Variant (15)..(15): Xaa in position 15 is Leu or Val
  Variant (16)..(16): Xaa in position 16 is any amino acid
  Variant (17)..(17): Xaa in position 17 is Asp, Glu or Lys
LXKXLXXTQTXXXXXXX

SEQ ID NO: 4321 - protein, 26 aa, Artificial sequence
  protein pattern
  Variant (2)..(2): Xaa in position 2 is Leu or Val
  Variant (3)..(3): Xaa in position 3 is Asn or Ser
  Variant (4)..(4): Xaa in position 4 is Asp or Gln
  Variant (5)..(5): Xaa in position 5 is Cys or Ser
  Variant (6)..(6): Xaa in position 6 is any amino acid
  Variant (7)..(7): Xaa in position 7 is Pro or Val
  Variant (8)..(8): Xaa in position 8 is any amino acid
  Variant (9)..(9): Xaa in position 9 is Gly or Thr
  Variant (10)..(10): Xaa in position 10 is any amino acid
  Variant (11)..(11): Xaa in position 11 is Ala, Pro or Thr
  Variant (12)..(12): Xaa in position 12 is Leu or Pro
  Variant (13)..(13): Xaa in position 13 is Asp or Glu
  Variant (14)..(14): Xaa in position 14 is any amino acid
  Variant (16)..(17): Xaa in position 16 to 17 is any or no amino acid
  Variant (19)..(22): Xaa in position 19 to 22 is any amino acid
  Variant (23)..(23): Xaa in position 23 is any or no amino acid
  Variant (25)..(25): Xaa in position 25 is any amino acid
  Variant (26)..(26): Xaa in position 26 is Gly or Leu
LXXXXXXXXXXXXXKXXPXXXXXSXX

SEQ ID NO: 4322 - DNA, 345 bp, Saccharomyces cerevisiae
  CDS (1)..(345)
atgtctgaagtaattgaaggtaacgtcaaaattgacagaatttccccaggtgatggtgccaccttcccaaagacaggtgacttggttaccattcattacaccggtaccttggagaacggccaaaaattcgattcctccgttgacaggggctctccattccaatgtaacatcggtgtcggccaagtcatcaagggttgggatgttggtattccaaagttgtctgttggtgaaaaagctaggttaaccatccctggcccatatgcttatggcccacgtggtttcccaggtttgattccaccaaacagtactttggttttcgacgtcgaattgttgaaggtcaactaa

SEQ ID NO: 4323 - protein, 114 aa, Saccharomyces cerevisiae
MSEVIEGNVKIDRISPGDGATFPKTGDLVTIHYTGTLENGQKFDSSVDRGSPFQCNIGVGQVIKGWDVGIPKLSVGEKARLTIPGPYAYGPRGFPGLIPPNSTLVFDVELLKVN

SEQ ID NO: 4324 - DNA, 820 bp, Glycine max
  CDS (162)..(626)
aatttcagtgaccccaccttttgacaattcttcacagttcacactctcggagggtctggaattggatcgtccttgtcctattaaataacaccgcccaccgactgtgtgagtccgagtgtgagagaaaccagtgactgacttttcgagaaagaaaaacaaaaatgagtttccgtcattccatcatgaacgctcttcccattctcctcttcttcctcttcgtttctgcattagtttctgcgaagaaaactggtgatgtgacggagctgcaaattggcgtgaagcataaaccagtatcatgtgaagttcaggcacacaaaggtgacagagtcaaagtacactataggggaaaactcactgatggaactgttttcgattctagctttgaaagaaataatccaattgaatttgagcttggtactggtcaagtgatcaaaggttgggaccagggattattgggaatgtgtcttggtgagaagcgtaagctgaaaataccatcaaaacttggctatggagagcagggttccccacccactattccaggtggtgctacactcatatttgacgctgagcttgtgggagtgaacgacaaaagtttaggcgaaggaaaaggaaacaacgaactgtagacaaatcaaaacaaatggatagtcgagcttttgctatcttagcttatttttgttcctcaataatatgcttttatgacccaaggtttaactgttttactatgaggctaatttagaaagatttatctggtgtgtacccctaaaaaaaaaaaacaacacaaccaagaaaatagtagctattaaggacctgtttgaat

SEQ ID NO: 4325 - protein, 154 aa, Glycine max
MSFRHSIMNALPILLFFLFVSALVSAKKTGDVTELQIGVKHKPVSCEVQAHKGDRVKVHYRGKLTDGTVFDSSFERNNPIEFELGTGQVIKGWDQGLLGMCLGEKRKLKIPSKLGYGEQGSPPTIPGGATLIFDAELVGVNDKSLGEGKGNNEL

SEQ ID NO: 4326 - DNA, 1102 bp, Glycine max
  CDS (89)..(718)
tggacccatggctgggtttgatatcctgagcgagccatagaaagagttgaattaatagagatacagataacgtgaaactgaaaggaaaatggcactctcagtctcctcaccctcatgcgtacgcgttccttcatgtttttggaaaccaaatggcaagagttgcaaagagcgtactaaggtttcatgtgcagctcacaatgataataagaatccgttggttggaatcggtattggggttgtaacgtcttgtgtgatgggtttaactgcattggatgcggacgccacgagaatcgaatactacgcaacagtggcagagcctttgtgtgagtacaactatgttaagtctggcctcggctactgcgatattgctgagggcttcggtgacgaagctccactgggtgagcttatcaatgttcactatactgcgagattcgctgatgggatagtattcgatagcagctataaacgtgctagacctctcaccatgcgcattggtgtgggcaaggtaatcaagggactggatcaggggattttagggggtgaaggagtacctccaatgcggataggtgggaaacgcaaactgcagattcctccgcacttagcatatggccctgaacctgcagggtgcttctcaggtgactgcaatatacccgccaatgccactcttctgtatgatattaattttgttgaggtttattcggggaacagatcaaagtgaagtcagtcaaaactggtcagatacatatatacatatgaaccacagatggatgggtttagagcaatgaaatggacattttgctagagaatatggatcaacttgtttggcagaatcttcttcctgattacaactacctcaagttactgttcctggttagtggagttgtacatgattgacctggatatcccttttgagagtaatgagcaatccttcctggtgatatatattaagataattcatgtgtatctctgcacatgacatgcgaacagtttgtgcatctttagtgtaaatgtaattttcaatactgctctgaatgataaaaaattgttaattcttcatttgataaatgcctgtctctaatacgtgatatgctttacccttttc

SEQ ID NO: 4327 - protein, 209 aa, Glycine max
MALSVSSPSCVRVPSCFWKPNGKSCKERTKVSCAAHNDNKNPLVGIGIGVVTSCVMGLTALDADATRIEYYATVAEPLCEYNYVKSGLGYCDIAEGFGDEAPLGELINVHYTARFADGIVFDSSYKRARPLTMRIGVGKVIKGLDQGILGGEGVPPMRIGGKRKLQIPPHLAYGPEPAGCFSGDCNIPANATLLYDINFVEVYSGNRSK

SEQ ID NO: 4328 - DNA, 809 bp, Glycine max
  CDS (8)..(658)
ggtggagatgggtttagtggcaccttactctgctggaacatgtcttccttcccttcaacgccttccaaccctgcaagcccaaaaatggaacaacttctcagcacctcttagttgccaccgccaagtgaaatgtgctgtccaagtccaaccacaagtagcaccacgaattacacctgatgagagcctgcaggtgaagagaagaactctcataggccttctagcatttgatgctgtccttgcttattcttcattgcaagcagcaccagcagctgaaaatccgtgtgaatttcaagtggcaccttcaggccttgccttctgtgacaaacttgtgggagctggtcctcaagcagtgaagggacagcttattaaggcgcattatgtggggagattggagaatgggaaagttttcgatagcagctacaatcgtggcaagccactaacctttcgcgtcggtgttggagaggtcattaaaggttgggatgaaggcattataggaggtgatggagttccccccatgcttgcaggagggaaacgtacactgaagattcctccagaacttggatatggctcaagaggggctggttgtaggggaggttcatgtatcattcctcctgattcggtattattgtttgacgtggagttcgttagcaaagcatgatttacaaagccgtgagctggcaaattgccttcttttttgtttggagtttggagcttacatttcatatagtagaaattttataatttaatatcaaagtaaaaattacttgataaatgcatgactaagtaataaacatgctatgttgttgatt

SEQ ID NO: 4329 - protein, 216 aa, Glycine max
MGLVAPYSAGTCLPSLQRLPTLQAQKWNNFSAPLSCHRQVKCAVQVQPQVAPRITPDESLQVKRRTLIGLLAFDAVLAYSSLQAAPAAENPCEFQVAPSGLAFCDKLVGAGPQAVKGQLIKAHYVGRLENGKVFDSSYNRGKPLTFRVGVGEVIKGWDEGIIGGDGVPPMLAGGKRTLKIPPELGYGSRGAGCRGGSCIIPPDSVLLFDVEFVSKA

SEQ ID NO: 4330 - DNA, 719 bp, Glycine max
  CDS (131)..(574)
  misc_feature (665)..(665): n is a, g, c or t
cccacgcgtccgcccacgcgtccgcccacgcgtccgtacggctgcgagaagacgacagaagggggagagaaactagtgactgacttttcgagaaagaaaaacaaaaaagagtttccggcattattccatcatgaacgctcttcccattcttctcttcttcctcttcgtttcggcattagtttatgcgaagaaaactggcgatgtgacggagttgcaaattggcgtgaagcataaaccagcatcatgtgaagttctggcacacaaaggtgacagagtcaaagtacactatcggggaaaactcactgatggaactgttttcgattctagctttgaaagaaataatccaattgaatttgagcttggtactggtcaagtgatcaaaggttgggaccagggattattgggaatgtgtcttggtgagaagcggaagctgaaaataccagcgaaacttggctatggagatcagggttccccacccactattccaggtggtgcaacactcatatttgacactgagcttgtgggagtgaacgacaaaagtttaggcgaagaaaaagaaaactccgaactgtagacaaatcaaaagaaatggatagtttgagtttttgctgtcttagcttatttttgttccccaatcatatgtttttatgacccaaggtttcaangttaaaagatgaggctaatttagtaaaaaaaaaaaaaagaaaaaagcgcccgct

SEQ ID NO: 4331 - protein, 147 aa, Glycine max
MNALPILLFFLFVSALVYAKKTGDVTELQIGVKHKPASCEVLAHKGDRVKVHYRGKLTDGTVFDSSFERNNPIEFELGTGQVIKGWDQGLLGMCLGEKRKLKIPAKLGYGDQGSPPTIPGGATLIFDTELVGVNDKSLGEEKENSEL

SEQ ID NO: 4332 - DNA, 468 bp, Glycine max
  CDS (37)..(375)
ggagaagaagagaatcataagaaagcaagaaagaaaatgggagtggagaagcagttgttgaggcctggcaccggtcccaagccaattcccggtcagaacgtcaccgttcactgcactggtttcgggaagaacggtgacctttctcagaaattctggagcaccaaggatcctggccaggaccctttcactttcaaaatcggccaaggttctgttatcaaaggatgggatgaaggtgtgcttggcatgcaaattggtgaagttgctcgtctccggtgctctccggattatgcttatggtgctggtggctttccttcttgggggatacagcccaactctgtcttggaatttgaaatcgaagtcttgagtgcacaatgaaaaccttggtagtctgtctctgtcctaagaataaaatcatcatccatttccatggacttgtattatggtatccccactttgtgactcgtgagt

SEQ ID NO: 4333 - protein, 112 aa, Glycine max
MGVEKQLLRPGTGPKPIPGQNVTVHCTGFGKNGDLSQKFWSTKDPGQDPFTFKIGQGSVIKGWDEGVLGMQIGEVARLRCSPDYAYGAGGFPSWGIQPNSVLEFEIEVLSAQ

SEQ ID NO: 4334 - DNA, 413 bp, Glycine max
  CDS (40)..(378)
ggaggagagaggagaagagaagctaaagaaagaaaggagatgggagtggagaagcagttgttgaggtctggcaccggtccgaagccaattcccggtcagaacgtaaccgttcactgcactggtttcgggaagaacggtgacctttctcagaaattctggagcacaaaggatcctggccagaacccattcactttcaaaatcggccaaggttctgttatcaaaggatgggatgaaggtgtgcttggcatgcaaattggtgaagttgctcgtctccggtgctctccggattatgcttatggtgctggtggctttcctgcttggggaatacggcccaactctgtcttggaatttgaaatcgaagtcttaagtgcgcaatgaaaaccttggtagtctgtctctgtcctaaagaataa

SEQ ID NO: 4335 - protein, 112 aa, Glycine max
MGVEKQLLRSGTGPKPIPGQNVTVHCTGFGKNGDLSQKFWSTKDPGQNPFTFKIGQGSVIKGWDEGVLGMQIGEVARLRCSPDYAYGAGGFPAWGIRPNSVLEFEIEVLSAQ

SEQ ID NO: 4336 - DNA, 947 bp, Glycine max
  CDS (105)..(671)
caaattcggggctttcatcaattacacgcttcattcgcttcattccacccttcacctgaaaaaaaaaaaaaaaacaaacaaacaaacaaaaaggagtgcaaaccatgggcgatgcaattgatttgtccggcgacggaggagtcattaagaccattgtcagaaaaagcaaagccgatgctgttggtccaacagaaaattttcctcttgttgatgttcattatgaaggcacacttgctgatactggtgaagtttttgacactacacatgaagataacaccatcttctctttcgagattggaaagggcagtgttatcaaggcttgggaaattgctgtgaaaaccatgaaggttggagaagttgcaaaaataacttgcaagccagaatatgcatatggcagtgcaggatctcctccagatattcctccagacgcacaacttgtttttgaagttgagcttgttgcttgtcggccaaggaagggctccagtttgggaagtgtttcagaggagagggctaggcttgatgagctgaagaagcagagagagctagctgctgctgccaaagaggaagagaagaagaagagagaagaagcaaaagcagtggctgccgcacgtgtgcaagccaagttagaagccaaaaaaggtcaaggaaagggtaaaggtaaagcaaagtaggaagttagcaaacatctatatgagtttggtatatgatgacaatcaaatagttatgtgttatacactattcagtatctcactacttcccctttggcccatccaaaaccttatataaatgaaatgctgctttggctagatgcttttgtctaattatatggacaccatatttcgtcccttctgaatgtagctagctgatatatacaagcaattctgtaataataagcgttggatacgtaataaagttgatgggaatgatgagttccctatgtcaatttc

SEQ ID NO: 4337 - protein, 188 aa, Glycine max
MGDAIDLSGDGGVIKTIVRKSKADAVGPTENFPLVDVHYEGTLADTGEVFDTTHEDNTIFSFEIGKGSVIKAWEIAVKTMKVGEVAKITCKPEYAYGSAGSPPDIPPDAQLVFEVELVACRPRKGSSLGSVSEERARLDELKKQRELAAAAKEEEKKKREEAKAVAAARVQAKLEAKKGQGKGKGKAK

SEQ ID NO: 4338 - DNA, 381 bp, Glycine max
  CDS (1)..(381)
atggtgcctacggtaactactggatcaggtttgcaatacaaggatattaaagttgggcaaggtcctagtccaccaatcggatttcaggtggctgctaattacgttgcaatggttccctctggacaaatatttgatagttcactggagaaaggtcagccttacatttttcgtgttggttctggtcaggtgatacaaggacttgatgaaggtattctgagcatgaaagtaggggggaagcgtcgactgtacatacccggatcactggcattcccaaaaggccttacttctgctcctggaagaccaagggtggctccaagcagtccagtcatatttgacgttagtttggaatatataccggggcttgaagtggatgaggagtaa

SEQ ID NO: 4339 - protein, 126 aa, Glycine max
MVPTVTTGSGLQYKDIKVGQGPSPPIGFQVAANYVAMVPSGQIFDSSLEKGQPYIFRVGSGQVIQGLDEGILSMKVGGKRRLYIPGSLAFPKGLTSAPGRPRVAPSSPVIFDVSLEYIPGLEVDEE

SEQ ID NO: 4340 - DNA, 567 bp, Glycine max
  CDS (1)..(567)
atgggcgatgcaattgatttgactggtgacggaggagtcattaaaaccattgtaagaaaaagcaaagctgatgctgtcggtccaacagaaaatttccctcttgttgatgttcattatgaaggcacacttgctgatactggtgaagtttttgacactacacatgaagataacaccatcttctctttcgagattggaaagggcagtgttatcaaggcttgggaaattgcagtgaaaaccatgaaggttggagaagttgcaaaaataacttgcaagccagaatatgcatatggtagtgcaggatctcctccagatattcctccagatgcaacacttgtttttgaagttgagctagttgcctgtcggccaaggaagggctccagtttgggaagtgtttcagaggagagggctaggcttgatgaactgaagaagcagagagagctagctgctgctgccaaagaggaggagaaaaagaagagagaagaagcaaaagcagcggctgccgcacgtgtgcaagccaagttagaagccaaaaaaggtcaaggaaagggtaaaggtaaagcaaagtag

SEQ ID NO: 4341 - protein, 188 aa, Glycine max
MGDAIDLTGDGGVIKTIVRKSKADAVGPTENFPLVDVHYEGTLADTGEVFDTTHEDNTIFSFEIGKGSVIKAWEIAVKTMKVGEVAKITCKPEYAYGSAGSPPDIPPDATLVFEVELVACRPRKGSSLGSVSEERARLDELKKQRELAAAAKEEEKKKREEAKAAAAARVQAKLEAKKGQGKGKGKAK

SEQ ID NO: 4342 - DNA, 327 bp, Bombyx mori (domestic silkworm)
  CDS (1)..(327)
atgggtgttactgttgaaactatcagtccaggagacgagtcgacctaccccaaatcaggacagactgtagttgttcactacactggaacacttacgaacggcaaaaagtttgactcatcgcgtgaccgtggcaagcccttcaagttcaggatcggaaaatctgaagtaatccgtggctgggatgagggtgtggcaaagatgtctgtaggtgagcgtgccaaattaacctgctctcctgactatgcttacggtcagcaaggccaccctggagtcatacctcccaactctacacttattttcgatgtagaacttctacgtctcgaataa

SEQ ID NO: 4343 - protein, 108 aa, Bombyx mori (domestic silkworm)
MGVTVETISPGDESTYPKSGQTVVVHYTGTLTNGKKFDSSRDRGKPFKFRIGKSEVIRGWDEGVAKMSVGERAKLTCSPDYAYGQQGHPGVIPPNSTLIFDVELLRLE

SEQ ID NO: 4344 - DNA, 327 bp, Bombyx mori (domestic silkworm)
  CDS (1)..(327)
atgggagtcgacgtggaaactatttcacctggaaatggatcaacttacccaaaaccgggccaaactgtagtcgttcactacactggaacgttacaaaacggaaagaaattcgattcatctcgagatagagggcaaccttttaaattcacattaggcaaaggtgatgtcataaaaggatgggatcaaggattagcaaagatgtctgtaggggaaagagcgaaattgacgtgctctcctgactttgcctatggttccagaggccacccaggtgtaataccaccaaacgctactctaatttttgacgttgaactcttacgtgttgaataa

SEQ ID NO: 4345 - protein, 108 aa, Bombyx mori (domestic silkworm)
MGVDVETISPGNGSTYPKPGQTVVVHYTGTLQNGKKFDSSRDRGQPFKFTLGKGDVIKGWDQGLAKMSVGERAKLTCSPDFAYGSRGHPGVIPPNATLIFDVELLRVE

SEQ ID NO: 4346 - DNA, 651 bp, Bombyx mori (domestic silkworm)
  CDS (1)..(651)
atgacgacgttgcgctgcgtgcttatgctggttgccttggccggggccacgttcgcgggtcctgaggtcactgaactaaagacagaagtagttagcgttccagaaggatgcaccacgaagtccaagcacggcgatatgctcaccatgcactacactggcacgctagacgacggacacaagttcgactcgagttatgatcgcgatcaaccttttacgttccaaattggcgttgggcaagtgatcaagggatgggaccagggcttgcttgacatgtgcgttggtgaaaaacgtaaactgactattcccgcatccttgggctacggagagcgcggagccggcaacgtgattcctccccacgctacattgcatttcgaagtggagttgatcaacatcggtgactctccaccggccacaaacgtgttcaaggaaatcgacgccgataaggacaacatgctctcccgcgaagaagtgagcgactatttgaagaagcagatggttcccgccgacggtggtgaagtaagcgaagacatcaagcaaatgttggaaagtcacgataaacttgttgaggaaatcttccagcacgaagataaagacaaaaatggcttcatcagccatgaggaattctctggacctaagcacgacgaactttaa

SEQ ID NO: 4347 - protein, 216 aa, Bombyx mori (domestic silkworm)
MTTLRCVLMLVALAGATFAGPEVTELKTEVVSVPEGCTTKSKHGDMLTMHYTGTLDDGHKFDSSYDRDQPFTFQIGVGQVIKGWDQGLLDMCVGEKRKLTIPASLGYGERGAGNVIPPHATLHFEVELINIGDSPPATNVFKEIDADKDNMLSREEVSDYLKKQMVPADGGEVSEDIKQMLESHDKLVEEIFQHEDKDKNGFISHEEFSGPKHDEL

SEQ ID NO: 4348 - DNA, 342 bp, Pseudomonas aeruginosa PAO1
  CDS (1)..(342): transl_table=11
atgaacgaccgactgcagatcgaagacctcctcctgggcgacggcaaggaggtagtgaagggtgcgctgatcaccacccagtacaagggcaccctggaagacggcacgctgttcgactcctcctacgagcgcggccggccattccagtgcgtgatcggcaccggacgagtgatcaagggttgggaccagggcctgatgggcatgaaggtcggtggcaagcgacggctgttcgtcccttcccacctggcctacggcgaacggcaggtcggcgcgcacatcaagccccactccaacctgctgttcgagatcgaactgctggaagtgctcacccgcgacgactga

SEQ ID NO: 4349 - protein, 113 aa, Pseudomonas aeruginosa PAO1
MNDRLQIEDLLLGDGKEVVKGALITTQYKGTLEDGTLFDSSYERGRPFQCVIGTGRVIKGWDQGLMGMKVGGKRRLFVPSHLAYGERQVGAHIKPHSNLLFEIELLEVLTRDD

SEQ ID NO: 4350 - DNA, 459 bp, Deinococcus radiodurans R1
  CDS (1)..(459): transl_table=11
atgaccgctgcttcatacgccgggcagctgactttttccacttctcatctctctacctgcgaccctcacgaccttcacgggtgttttactgagttcctggccagtggacgggcgcgttactctcggcgcatgactcaggatttacaagtcgagaaataccaggaaggcagcggccagccggcagaaaaaggcaagatggtcagcgtgcactacacaggcacgctggaaaacggccagaagttcgactccagccgcgaccggggccagcccatcgagttcccgctcggcgtcggctacgtgattcccggctgggaccagggcatcgcgcagatgcgggtgggcgacaaggcccggctgaccatccccggccacctcgcctacggtgaagcgggcgttcccggcgtcattccccccaacgccaccctgattttcgacgtggaactgatggacgtgcgctga

SEQ ID NO: 4351 - protein, 152 aa, Deinococcus radiodurans R1
MTAASYAGQLTFSTSHLSTCDPHDLHGCFTEFLASGRARYSRRMTQDLQVEKYQEGSGQPAEKGKMVSVHYTGTLENGQKFDSSRDRGQPIEFPLGVGYVIPGWDQGIAQMRVGDKARLTIPGHLAYGEAGVPGVIPPNATLIFDVELMDVR

SEQ ID NO: 4352 - DNA, 606 bp, Synechocystis sp. PCC 6803
  CDS (1)..(606): transl_table=11
atgaggggaagaacccatgggataatcaggccaacactactccgacctatttttttgatgaaattttttaccgctatgcgcgacattcttattagtctgaccgttgttactttttttagcttggtgttaatttccgtggccatttttggtaaatcttctccgtcggcgatcgccgctccccaggaagttaaaccagtccaaattgcccaagcttctgccctacaaaccccggaaccatctcccatgactgccgaaaattccgccaatattgtcaccaccgagtctggattgcaatacatcgatgaagtggtaggggaaggccccagccccactaaaggccaaaaagtagaagtacactacactggccgcctcaccgacggcactaagtttgatagctccgtggaccgcaataagccttttaccttcaccattggcgtcggccaggtgatcaaaggttgggacgaaggggtggccaccatgcaagtgggtggtaagcgtaaactgatcattccaccggacttggcctatggctcccggggagcgggtggtgtaattccccccaatgccaccttggaatttgaagtggaattgcttggtattaagtag

SEQ ID NO: 4353 - protein, 201 aa, Synechocystis sp. PCC 6803
MRGRTHGIIRPTLLRPIFLMKFFTAMRDILISLTVVTFFSLVLISVAIFGKSSPSAIAAPQEVKPVQIAQASALQTPEPSPMTAENSANIVTTESGLQYIDEVVGEGPSPTKGQKVEVHYTGRLTDGTKFDSSVDRNKPFTFTIGVGQVIKGWDEGVATMQVGGKRKLIIPPDLAYGSRGAGGVIPPNATLEFEVELLGIK

SEQ ID NO: 4354 - DNA, 621 bp, Salmonella typhimurium LT2
  CDS (1)..(621): transl_table=11
atggccaccccgacttttgacactattgaagcgcaagcgagctacggcattggtttgcaggtagggcagcagctcagcgaatccggtcttgaagggctgttgcctgaagcgctggttgcaggcattgctgatgcgctggaaggtaaacacccggcggttcctgttgatgtggtgcatcgtgcgctgcgtgaaattcatgagcgtgcggacgcggtgcgtcgtgagcgtttcaaagcgatggcggccgaaggcgtgaaatacctggaagaaaaccgcgaaaaagacggtgtgaacagtactgagtctggtttacagttccgcgttctgacgcagggcgaaggcgcgattccggcgcgtaccgaccgcgtacgcgtgcattacaccggtaagcttattgatggcaccgtatttgacagctccgtcgcgcgcggcgaaccggctgaattcccggtaaatggcgtgatcgccggctggattgaagcgctgactctgatgccggtaggttccaaatgggaactgactatcccacaggagctggcctatggcgagcgtggggccggggcatctattccgccattcagcaccctggtgtttgaagtggaactgctggaaattctgtaa

SEQ ID NO: 4355 - protein, 206 aa, Salmonella typhimurium LT2
MATPTFDTIEAQASYGIGLQVGQQLSESGLEGLLPEALVAGIADALEGKHPAVPVDVVHRALREIHERADAVRRERFKAMAAEGVKYLEENREKDGVNSTESGLQFRVLTQGEGAIPARTDRVRVHYTGKLIDGTVFDSSVARGEPAEFPVNGVIAGWIEALTLMPVGSKWELTIPQELAYGERGAGASIPPFSTLVFEVELLEIL

SEQ ID NO: 4356 - DNA, 498 bp, Nostoc sp. PCC 7120
  CDS (1)..(498): transl_table=11
atgctggcctgtgttgtggttttggtattggcacaagtggggaataaacaggactctgctattgctgctaatttacctcaaactccactagccaccattagcgttactgaaaacaatactccaatcaagaaaaatatcatgtctgaagcctctaagccgcctgttactaccgattctggactcaaatatgtggaaatagaagagggaactggcgcgactcctaaaagtggacaaaccgtcgtagttcactacacaggtactctagaagatggtaccaagtttgatagctcacgcgatcgcaatcgtcccttcagctttaccatcggcgttggacaagtaattaaaggttgggatgaaggacttagcactatgaaagtaggtggtcgtcgtcaattaatcatcccttcagaattgggttatggcgctcgtggtgctggtggggtgattccaccttacgcaaccctgctgtttgatgtggaattgttggaagtgaagtag

SEQ ID NO: 4357 - protein, 165 aa, Nostoc sp. PCC 7120
MLACVVVLVLAQVGNKQDSAIAANLPQTPLATISVTENNTPIKKNIMSEASKPPVTTDSGLKYVEIEEGTGATPKSGQTVVVHYTGTLEDGTKFDSSRDRNRPFSFTIGVGQVIKGWDEGLSTMKVGGRRQLIIPSELGYGARGAGGVIPPYATLLFDVELLEVK

SEQ ID NO: 4358 - DNA, 354 bp, Ralstonia solanacearum GMI1000
  CDS (1)..(354): transl_table=11
atgaccatcaccaccacccagagcggcctgcaatacgaagacgtcaccgtgggcgacggcgccgaagccaccgccggcaagtacgtcaccgtgcactacaccggctggctgtacgagaacggccaggccggccgcaagttcgattccagcaaggaccgcaacgatccgttcgccttcccgctgggcgccggccacgtcatcaagggctgggacgaaggcgtgcagggcatgaaggtcggcggcacgcgcaagctgatcatcccggccgagctgggctacggtgcgcgcggcgcgggtggggtgattcccccgaacgcaacgctgcttttcgaggtcgatctgctggaagtctga

SEQ ID NO: 4359 - protein, 117 aa, Ralstonia solanacearum GMI1000
MTITTTQSGLQYEDVTVGDGAEATAGKYVTVHYTGWLYENGQAGRKFDSSKDRNDPFAFPLGAGHVIKGWDEGVQGMKVGGTRKLIIPAELGYGARGAGGVIPPNATLLFEVDLLEV

SEQ ID NO: 4360 - DNA, 372 bp, Streptomyces coelicolor A3(2)
  CDS (1)..(372): transl_table=11
gtgagcatcgacaagcccgaggtcgacttcccgggcggcgagcccccggcggacctcgagatcaaggacatctgggagggcgacggcccggttgccgaggccggtcagaccgtgaccgtccactacgtgggcgtgaccttcagcacgggcgaggagttcgacgccagctggaaccgcggtgcgccgttccgcttcccgctcggcggcggccgcgtcatcaagggctgggaccagggcgtgcagggcatgaaggtcggcggccgtcgccagctgaccatcccggcgcacctcgcctacggcgaccagagcccggccccggcgatcccgcccggctcgacgctgatcttcgtggtcgatctgctcggagtctga

SEQ ID NO: 4361 - protein, 123 aa, Streptomyces coelicolor A3(2)
MSIDKPEVDFPGGEPPADLEIKDIWEGDGPVAEAGQTVTVHYVGVTFSTGEEFDASWNRGAPFRFPLGGGRVIKGWDQGVQGMKVGGRRQLTIPAHLAYGDQSPAPAIPPGSTLIFVVDLLGV

SEQ ID NO: 4362 - DNA, 399 bp, Xanthomonas axonopodis pv. citri str. 306
  CDS (1)..(399): transl_table=11
ttgctcgcaagctgcgcacccaccctgccgccctccggcgggaccatcgccagtttcgagcggatcgaccgcaacctggggaccggcgcagaggccacaccaggggccatggtcaccgtgcactacaccggctggctgtacgacgaaaaagccgccgacaaacatggcaagaagttcgacagctcgctggatcgcgccgagccgttccaattcgtattgggcggccaccaggtcatccgcggctgggacgatggcgtggccggcatgcgtgtcggcggcaagcgcaccttgatgatcccgcccgattacggctatggcgacaacggcgccggtggcgtgataccgcccggtgcatcgctggtgttcgatgtggaattgctgggcgtgcagccgcgttga

SEQ ID NO: 4363 - protein, 132 aa, Xanthomonas axonopodis pv. citri str. 306
MLASCAPTLPPSGGTIASFERIDRNLGTGAEATPGAMVTVHYTGWLYDEKAADKHGKKFDSSLDRAEPFQFVLGGHQVIRGWDDGVAGMRVGGKRTLMIPPDYGYGDNGAGGVIPPGASLVFDVELLGVQPR

SEQ ID NO: 4364 - DNA, 489 bp, Thermosynechococcus elongatus BP-1
  CDS (1)..(489): transl_table=11
atggtaaaacaatgggtgcatcgaggctgcggctggctcctctgtggtattgtcctagtagtggtatggttggtggccgctccgatggcgatcgccagtgtgccactggaggcgtcaacggaggctgcaggactgatggggaatccaaaggtggtgactaccccttcgggtttgcaatacgaagatattgttgtcggctcaggggcacagccccaggtgggcgatcgcgtcacggtgcactacacaggaatgctcactgatggccgtatttttgatagctcccgcgatcgcggtcagcccttccaatttcaaattggtgtcggtcaagtcattaaagggtgggatgaaggggttggctcaatgcacgtcggtggtcagcggcggctgattattcccccgaacctaggctatggtgcccggggggtgggcggggtcattccccccaatgccacgctgatttttgatgttgaactgttgggtgtgcaatag

SEQ ID NO: 4365 - protein, 162 aa, Thermosynechococcus elongatus BP-1
MVKQWVHRGCGWLLCGIVLVVVWLVAAPMAIASVPLEASTEAAGLMGNPKVVTTPSGLQYEDIVVGSGAQPQVGDRVTVHYTGMLTDGRIFDSSRDRGQPFQFQIGVGQVIKGWDEGVGSMHVGGQRRLIIPPNLGYGARGVGGVIPPNATLIFDVELLGVQ

SEQ ID NO: 4366 - DNA, 336 bp, Shewanella oneidensis MR-1
  CDS (1)..(336): transl_table=11
atgactgaattagaaataatcgatctggttgtcggtgatggaaaagaagctgtaaaaggcgcgttgatcactacccaataccggggatttttacaggatggtacgcagttcgattcctcctatgaccgtggtcaggcatttcaatgtgtgattgggactggccgagtgattaaaggctgggaccaagggattatggggatgaaagtgggcggcaaacgcaagttattggtgccagctcatttagcctatggtgagcgccaagttggggctcatatcaaaccaaattctgatctcacctttgaaatcgaattgcttgaagtgctgactcgcgactaa

SEQ ID NO: 4367 - protein, 111 aa, Shewanella oneidensis MR-1
MTELEIIDLVVGDGKEAVKGALITTQYRGFLQDGTQFDSSYDRGQAFQCVIGTGRVIKGWDQGIMGMKVGGKRKLLVPAHLAYGERQVGAHIKPNSDLTFEIELLEVLTRD

SEQ ID NO: 4368 - DNA, 465 bp, Bradyrhizobium japonicum USDA 110
  CDS (1)..(465): transl_table=11
atgcagcgtttccagcgcgtgctcctcgccatcatgtcggcactcgcgatcaccgtgatcgccggcgtgtccgatttcgtttccaccacggcctcggcccagaccgcaggaaagaccatgaccacagcttcaggcttgcaaatcatcgacaccgccgtcggcaccggcgcctcgccgcagcccggccagatctgcgtgatgcactataccggttggctttatgaaaacggccagaagggcaagaaattcgactcctcggtcgatcgcaaggagccgttcgagtttccgatcggcaagggccgcgtgatcgccggctgggacgagggcgtcgcctcgatgaaggtcggtggcaagcgcacgctgatcatcccgccgcagctcggctatggcgcgcgcggcgccggcggcgtgatcccgccgaacgcgacgctgatgttcgacgtggaattgctcgcggtgaagtga

SEQ ID NO: 4369 - protein, 154 aa, Bradyrhizobium japonicum USDA 110
MQRFQRVLLAIMSALAITVIAGVSDFVSTTASAQTAGKTMTTASGLQIIDTAVGTGASPQPGQICVMHYTGWLYENGQKGKKFDSSVDRKEPFEFPIGKGRVIAGWDEGVASMKVGGKRTLIIPPQLGYGARGAGGVIPPNATLMFDVELLAVK

SEQ ID NO: 4370 - DNA, 783 bp, Vibrio parahaemolyticus RIMD 2210633
  CDS (1)..(783): transl_table=11
atgaaatcagttttaaaagtgtcgctacttgctgcaacagtaatgctagcggtaggttgtcagaaagaagaaacaaaaccagaagcagcacctcaagcagaacaagttcaagcagaaacaggtaaagcggttcactttaaaaccgacgacgacaaagcggcatacgcaatcggtgtttcatttgctaactacctaagcactagcatcgaaaaaccaagcgaaatcggtatcaacctaaacaaagaccttgttcttaaaggtatcgaagatgtctttaaaggcaacgcagagctaaacgaagaagaaacacgtgctgctctagagtctctagacaagcgtgttgctgagaagatgcaagcacaagcagcagaaaaagcagcggcagcgaaaaaagctggcgatgatttccgtgcggaattcgaaaagcaagaaggcgtagtgaaaacagacacaggtcttctataccaagtaatcacacctgctgaaggcgagaagccaaaagacactgacactgtacaagtacactacaaaggtacgttgattgacggtactcagttcgacagctcttacgatcgtggtgagccagcaacgttccctctaaaccgtgttatcccaggttggacagaaggtgttcagctaatgccagtgggttctaaattcaaatttgttatcccgccagagcttgcatacggtgaccaagacacgccaagcattccagcaaactcaacacttgtatttgaagttgagctactaaaagttgagaatgacaaagctgagcaataa

SEQ ID NO: 4371 - protein, 260 aa, Vibrio parahaemolyticus RIMD 2210633
MKSVLKVSLLAATVMLAVGCQKEETKPEAAPQAEQVQAETGKAVHFKTDDDKAAYAIGVSFANYLSTSIEKPSEIGINLNKDLVLKGIEDVFKGNAELNEEETRAALESLDKRVAEKMQAQAAEKAAAAKKAGDDFRAEFEKQEGVVKTDTGLLYQVITPAEGEKPKDTDTVQVHYKGTLIDGTQFDSSYDRGEPATFPLNRVIPGWTEGVQLMPVGSKFKFVIPPELAYGDQDTPSIPANSTLVFEVELLKVENDKAEQ

SEQ ID NO: 4372 - DNA, 585 bp, Bacteroides thetaiotaomicron VPI-5482
  CDS (1)..(585): transl_table=11
atggataaattcagttacgctattggcctcggaatcggtcaaaacttattaagcatgggtgcaaaaggcatcgccgtagatgactttgcacaagcaattaaagatgtattggaaggtaatcagacggctatcagccatcaggaagcccgcgaaatagtgaacaagtatttcgaagaactggaagctaagatgggcgctgccgccatcgaacaaggaaaagctttcctcgaagaaaataagaaaaagccgggcgtggttacgctacccagcggactgcaatacgaagtgatcaacgaaggcacaggcaaaaaagcgaaagctaccgatcaggtaaaatgccactacgaaggcacactgatcgacggtacactgttcgacagctctatcaagcgcggagaaccggctgtattcggcgtcaatcaggtaatcccgggatgggtggaagcattgcaactgatgcccgaaggttccaaatggaaactctatattccgtccgaccttgcttatggcgccagaggtgccggagaaatgattcctccccacagcacattggtatttgaagtagaattactcgaagtattataa

SEQ ID NO: 4373 - protein, 194 aa, Bacteroides thetaiotaomicron VPI-5482
MDKFSYAIGLGIGQNLLSMGAKGIAVDDFAQAIKDVLEGNQTAISHQEAREIVNKYFEELEAKMGAAAIEQGKAFLEENKKKPGVVTLPSGLQYEVINEGTGKKAKATDQVKCHYEGTLIDGTLFDSSIKRGEPAVFGVNQVIPGWVEALQLMPEGSKWKLYIPSDLAYGARGAGEMIPPHSTLVFEVELLEVL

SEQ ID NO: 4374 - DNA, 375 bp, Streptomyces avermitilis MA-4680
  CDS (1)..(375): transl_table=11
gtgagcatcgagaagcccgagatcgacttcccgggcggcgagcccccggcggacctcgagatcaaggacatctgggagggcgacggaccggtcgccaaggcgggcaacaccgtctccgtgcactacgtgggtgtggccttctccaccggcgaggagttcgacgcgtcctggaaccgcggcaccccgctgcagttccagctcggtgccggccaggtcatcaagggctgggaccagggcgtgcagggcatgaaggtcggcggccgccgccagctgaccatcccggcgcacctcgcgtacggcgaccgcggcgccggtggcggccgtatcgcccccggcgagacgctgatcttcgtctgcgacctggtcgcggtctga

SEQ ID NO: 4375 - protein, 124 aa, Streptomyces avermitilis MA-4680
MSIEKPEIDFPGGEPPADLEIKDIWEGDGPVAKAGNTVSVHYVGVAFSTGEEFDASWNRGTPLQFQLGAGQVIKGWDQGVQGMKVGGRRQLTIPAHLAYGDRGAGGGRIAPGETLIFVCDLVAV

SEQ ID NO: 4376 - DNA, 462 bp, Nitrosomonas europaea ATCC 19718
  CDS (1)..(462): transl_table=11
atgatcaacgtaaagaaattactgagtctcgcactttcgggatggctatttctatccatgagcgctcaggctaccgaagaacaggcaacgtcacaccacacaaacgccgctgatgtcactacactggaaaaaatagatacccaggttgggacaggtgaagaggcggatattggcaaaaccgccaaggtgcactatacaggctggctgtatgatgctgctgccgaaggccacaaaggcaggaaattcgacagttcttacgatcgtggaagtcatttttcattcctgctcggagccgggcgggttatcaaagggtgggaccagggtgttatgggtatgaaggtaggtggcaaacgcactctgatcattccctcttccatggcgtatggctcacaaggagccgggcgggtcatccctcccaattcagcactggtattcgatgtggaattggtcggcctggaataa

SEQ ID NO: 4377 - protein, 153 aa, Nitrosomonas europaea ATCC 19718
MINVKKLLSLALSGWLFLSMSAQATEEQATSHHTNAADVTTLEKIDTQVGTGEEADIGKTAKVHYTGWLYDAAAEGHKGRKFDSSYDRGSHFSFLLGAGRVIKGWDQGVMGMKVGGKRTLIIPSSMAYGSQGAGRVIPPNSALVFDVELVGLE

SEQ ID NO: 4378 - DNA, 573 bp, Prochlorococcus marinus subsp. pastoris str. CCMP1986
  CDS (1)..(573): transl_table=11
gtgaaagaagttttaattagttttacgatttttgtattttgcctttcattaactctgtttagtcaatttaactcccctcaagttgttaatgcagctgaatcaaaaactgaattcgtaaataaaacacctattgcaaaatcatctaatgtttcaaataccaatatatttgaattagatccatcagatccaaacccaatacttttcgctatggcagaagaaacacaagaagaaagcaattctagaactacagatagtggtttaattattgtagatataattaatggagaaggagatgaagcaaattctgggcaaacagtttctgtaaactatacaggaacactagaagacggaacccaatttgataccagtattggcagagggccattcagtttcccattaggtgcagggagagtaatcaagggttgggatgaaggagtagccggaatgaaagttggtggaaaaagaaaattaacaattcctcctgagctaggatacggatcaagaggagcaggaaatgtaattcctgcaaatgcaactttaatttttgaagttgaattattgaaagtcaattaa

SEQ ID NO: 4379 - protein, 190 aa, Prochlorococcus marinus subsp. pastoris str. CCMP1986
MKEVLISFTIFVFCLSLTLFSQFNSPQVVNAAESKTEFVNKTPIAKSSNVSNTNIFELDPSDPNPILFAMAEETQEESNSRTTDSGLIIVDIINGEGDEANSGQTVSVNYTGTLEDGTQFDTSIGRGPFSFPLGAGRVIKGWDEGVAGMKVGGKRKLTIPPELGYGSRGAGNVIPANATLIFEVELLKVN

SEQ ID NO: 4380 - DNA, 627 bp, Synechococcus sp. WH 8102
  CDS (1)..(627): transl_table=11
atgcgcgacatcctgatcagctccacggtctgcgtgctctgcctgctgctagccctggtcagtcagctggtggccccatccacagtcgacgcagcagccgtcgatgcagcagcagccaccagcaccgccgcaaccgccagcgttgtcgccaagaccaccagcgcagtagcagcgcggcccagcttcgagctggacccagaggatcccaacccaaccttgtttgccatggctcccgacaccaaccaggccgatgcctccgccctcggcggcccccttgatgcccctgatactcagatcacagccagcggcctgaaaatcatcgaactgcaggtcggagaaggagcggaagccgcctccggccagaccgtttcagtgcactaccggggaacccttgagaacggcaagcaattcgacgccagctacgaccggggcaccccgttcaccttccccctcggagccggacgggtgatcaaaggctgggatgaaggggtggacggcatgaaggtcggcggcaagcgcaaactggtgatcccgccggatctcgcctatggcagccgcggtgctggcggcgtcatcccccccaacgccactctggtgttcgaggttgagctgctcgacgcgaagtga

SEQ ID NO: 4381 - protein, 208 aa, Synechococcus sp. WH 8102
MRDILISSTVCVLCLLLALVSQLVAPSTVDAAAVDAAAATSTAATASVVAKTTSAVAARPSFELDPEDPNPTLFAMAPDTNQADASALGGPLDAPDTQITASGLKIIELQVGEGAEAASGQTVSVHYRGTLENGKQFDASYDRGTPFTFPLGAGRVIKGWDEGVDGMKVGGKRKLVIPPDLAYGSRGAGGVIPPNATLVFEVELLDAK

SEQ ID NO: 4382 - DNA, 342 bp, Chromobacterium violaceum ATCC 12472
  CDS (1)..(342): transl_table=11
atgagcgaagaactgaagatcgaggacctggtggtgggcgagggcaaggaggcggtgcgcggcgcgctgatcaccagccattacaccggctggctggaggatggcagcaagttcgactcctcgctggacaagggccggccgttccagtgcgtgatcggcaccggccgcgtgatcaagggctgggaccaggggatgatgggcatgagggtgggcggcaagcgcaggctgtgggtgccggcgcacctggcctacggcgagcgccagatcggcgaccgcattccggccaactccaacctagtgttcgagatcgagttgctggaagtgctgacgcgggatgaataa

SEQ ID NO: 4383 - protein, 113 aa, Chromobacterium violaceum ATCC 12472
MSEELKIEDLVVGEGKEAVRGALITSHYTGWLEDGSKFDSSLDKGRPFQCVIGTGRVIKGWDQGMMGMRVGGKRRLWVPAHLAYGERQIGDRIPANSNLVFEIELLEVLTRDE

SEQ ID NO: 4384 - DNA, 327 bp, Chromobacterium violaceum ATCC 12472
  CDS (1)..(327): transl_table=11
atgagcgaactgatcatcgaagaattgcaggtcggcgaaggcgccgaagccgtcaccggccaggaagtcaccgtccattacaccggctggctgaccgatggcaccaagttcgactccagcaaggaccgcatgcagccgttcagcttcccgctgggcgccggctacgtgatcaagggctgggaccagggcgtgcagggcatgaaggtgggcggcaagcgcaagctgaccatcccgtccgagctgggttacggcgcgcgcggcgcaggcggcgtgattccgccgcacgcgacgctggtgttcgaagtggagctgctgcaggtaggctga

SEQ ID NO: 4385 - protein, 108 aa, Chromobacterium violaceum ATCC 12472
MSELIIEELQVGEGAEAVTGQEVTVHYTGWLTDGTKFDSSKDRMQPFSFPLGAGYVIKGWDQGVQGMKVGGKRKLTIPSELGYGARGAGGVIPPHATLVFEVELLQVG

SEQ ID NO: 4386 - DNA, 486 bp, Gloeobacter violaceus PCC 7421
  CDS (1)..(486): transl_table=11
atgctcaacaaatttactcgcctcaccctcgccaccgccttgctgcttgcggccaccgccgtagcggtgggcgagactgccgttgcccagagccccagccccaccacaggaaaaaataaaatgcctcagccaggccaaactccctcgtacaccaccaccacctccggcctcaagtacctcgacgagaccgtgggcaacggtgcttcgccccagaaaggccagcgcgtcaccgtgcactacaccggcaccctcgaagacggcaagaagttcgactcctcgcgggatcggggccagcccttcagctttaccatcggtgtcggccaggtgattcagggctgggacgagggtgtcgccacgatgaaggtgggcggcaagcgcaaactggtcgtcccggccaacctgggctacggtgcccgcggtgcgggaggggtgatcccgcccaacgccacgctgctgttcgacgtcgaactgttgggcgtgcagtag

SEQ ID NO: 4387 - protein, 161 aa, Gloeobacter violaceus PCC 7421
MLNKFTRLTLATALLLAATAVAVGETAVAQSPSPTTGKNKMPQPGQTPSYTTTTSGLKYLDETVGNGASPQKGQRVTVHYTGTLEDGKKFDSSRDRGQPFSFTIGVGQVIQGWDEGVATMKVGGKRKLVVPANLGYGARGAGGVIPPNATLLFDVELLGVQ

SEQ ID NO: 4388 - DNA, 621 bp, Photorhabdus luminescens subsp. laumondii TTO1
  CDS (1)..(621): transl_table=11
atggcaaaactttcttttgactctatcgaagcacaagcaagttatggggttggcttgcaagttggtcagcaattactggagtctggcctgcaaggtctggaacctgaagcgttgttagcggggttatgcgatgcgctggaaaatcattctccagcggtgccggtcgatatattgcatcgtgccttacgtgaaatgcatgaacgtgcagatggtgtgcgtcgtgaacgtcagcaagttatggcagaagagggacagaaatttctggcagaaaatgctcagcgtgacggtataagcacgacagaatctggtttacagttctctgtactaaagcagggtgatggtgcaattcctgcccatactgaccacgtgcgtgtccattacacggggcgtctgattgatggcaccgtgtttgacagctcagtacagcgtggtgaacctgctgaatttcctgtgaatggggtgattgctggatggattgaagcattgacgttgatgcctgtcggttctaaatgggaactttatatcccttataatttggcttatggcgagcgtggtgccggtgcatcgattcccccatatagcactctgattttcgaggtggaattgttggatattctgtaa

SEQ ID NO: 4389 - protein, 206 aa, Photorhabdus luminescens subsp. laumondii TTO1
MAKLSFDSIEAQASYGVGLQVGQQLLESGLQGLEPEALLAGLCDALENHSPAVPVDILHRALREMHERADGVRRERQQVMAEEGQKFLAENAQRDGISTTESGLQFSVLKQGDGAIPAHTDHVRVHYTGRLIDGTVFDSSVQRGEPAEFPVNGVIAGWIEALTLMPVGSKWELYIPYNLAYGERGAGASIPPYSTLIFEVELLDIL

SEQ ID NO: 4390 - DNA, 360 bp, Corynebacterium diphtheriae NCTC 13129
  CDS (1)..(360): transl_table=11
atggaaaagccccagatccaggttcccgaaggaccagccccagaagacatcgttatcgtcgacctcattgagggcgatggcgcagaagcacagccaggtggccttgtagaggttcactacgtaggcgtcgactttgaaaacggccaagagttcgactcctcttgggaccgcggccaaagcatcgagttcccattgtctggcctcatcgctggctggcaagaaggcatcccaggcatgaaggttggcggacgccgccagctcaccattccaccagaggcagcctacggtcctgccggtggcggacacccactgtccggtcgcaccctcgtgttcgtgattgaccttctcaacgtcggctag

SEQ ID NO: 4391 - protein, 119 aa, Corynebacterium diphtheriae NCTC 13129
MEKPQIQVPEGPAPEDIVIVDLIEGDGAEAQPGGLVEVHYVGVDFENGQEFDSSWDRGQSIEFPLSGLIAGWQEGIPGMKVGGRRQLTIPPEAAYGPAGGGHPLSGRTLVFVIDLLNVG

SEQ ID NO: 4392 - DNA, 459 bp, Rhodopseudomonas palustris CGA009
  CDS (1)..(459): transl_table=11
atgcgtttcgcttttcccgccggcgctctgctggctttggccgttactgcgctgtctcccgccgcggccctgatgtcgagcacccccgccatgtccgaatccgccaaatccgtcaccactccgtcgggtctccagatcgtggacacccaagtcggcaccggcgcgtcgccggcgcgcggccagatctgcgtgatgcactacaccggctggctctacgagaacggcgccaagacccgcaaattcgactcctcggtcgaccgcaacgagccgttcgaattcccgatcgggatgggccgggtgatcaagggctgggacgagggtgttgccagcatgaaggtcggcggcaagcgcacgctgatcattccgccggatctcggctacggcgcgcgtggcgctggcggcgtgatcccgccgaacgcgaccctggtcttcgatgtggaattgctcggcctcaagtaa

SEQ ID NO: 4393 - protein, 152 aa, Rhodopseudomonas palustris CGA009
MRFAFPAGALLALAVTALSPAAALMSSTPAMSESAKSVTTPSGLQIVDTQVGTGASPARGQICVMHYTGWLYENGAKTRKFDSSVDRNEPFEFPIGMGRVIKGWDEGVASMKVGGKRTLIIPPDLGYGARGAGGVIPPNATLVFDVELLGLK

SEQ ID NO: 4394 - DNA, 417 bp, Geobacter sulfurreducens PCA
  CDS (1)..(417): transl_table=11
gtggcggcctgttcggacagggaaaccaagccggccggcgaggcgaagcctgcaagcgccgccggcgcctcggatgccgtcacgactgcttcggggctttcctacgtggaccttgccgccgggtccggtgcggcccccgtggccggtaaaccggtgaaggttcactacacgggctggcttgagaacggcacgaagttcgacagctccgtggaccggggagagccgttcgtcttcaccatcggcgcgggcgaggtgatcccgggatgggacgagggggtcatgtccatgaaggtcggcggcaagcgccgtctcatcgtacccccccaactcgggtacggtgccgccggagccggcggggtgatcccgccgaatgcaactctgattttcgaggtggaactgctcgacgttgccacgtga

SEQ ID NO: 4395 - protein, 138 aa, Geobacter sulfurreducens PCA
MAACSDRETKPAGEAKPASAAGASDAVTTASGLSYVDLAAGSGAAPVAGKPVKVHYTGWLENGTKFDSSVDRGEPFVFTIGAGEVIPGWDEGVMSMKVGGKRRLIVPPQLGYGAAGAGGVIPPNATLIFEVELLDVAT

SEQ ID NO: 4396 - DNA, 621 bp, Yersinia pestis biovar Microtus str. 91001
  CDS (1)..(621): transl_table=11
atgacaaccccttcttttgatagcgttgaagcgcaagcgagctacgggattggtttacaaatcgggcagcaattacaagagtccggtctgcaaggtttattgccagaggcattgttggcaggtttgcgtgacgcgatggaagggaatacaccgactgtccctgttgatgtgatacatcgcgcgttacaagaagtgcatgaaaaggcagataaagtccgtattgagcgccagcaggcgttggtagacgaaggcaaaaccttcctggaagagaatgccaagcgtgatgatgtgactaccactgagtctggtttgcagttctccgtattgcaggcaggtgacggcccgatcccatcccgtcaggaccgtgtgcgtgtacattacaccggacgtttggttgatggtacggtatttgatagctctgttgagcgtggtcagccagccgacttccccgtcagcggcgttatcccaggttggatcgaagcgctgtctatgatgcctgtagggtctaaatggaagctgtatattccgcacaatctggcttatggcgagcgtggtgctggtgcaacgatcccgccgttcagcgccctgatgtttgaagtggaactgttggaaattctgtaa

SEQ ID NO: 4397 - protein, 206 aa, Yersinia pestis biovar Microtus str. 91001
MTTPSFDSVEAQASYGIGLQIGQQLQESGLQGLLPEALLAGLRDAMEGNTPTVPVDVIHRALQEVHEKADKVRIERQQALVDEGKTFLEENAKRDDVTTTESGLQFSVLQAGDGPIPSRQDRVRVHYTGRLVDGTVFDSSVERGQPADFPVSGVIPGWIEALSMMPVGSKWKLYIPHNLAYGERGAGATIPPFSALMFEVELLEIL

SEQ ID NO: 4398 - DNA, 429 bp, Strongylocentrotus purpuratus
  CDS (1)..(429)
atggtgtctcttaaaatagtgcttacactttgcttggcatcactgtgctgtcttggaaatgtttctggagagaaaagcaagaaactacaaattggtataaagaagaaggtggaagattgcaccactagatcacgcacaggagatcgtctttctatgcactacactggcaagttagaagatggaacagaatttgatagcagtattcccaggaaacaaacctttgactttacactaggagctgggcaagttattaaaggctgggatcaaggtctgctcaatatgtgtgaaggagagaagaggaagctagttatcccctcaaaccttggctatggtgatagaggatcaccccctaagattccaggtggagccactttgatctttgaggtagaactaataaagattaacaggaaagaatcagacgaactatga

SEQ ID NO: 4399 - protein, 142 aa, Strongylocentrotus purpuratus
MVSLKIVLTLCLASLCCLGNVSGEKSKKLQIGIKKKVEDCTTRSRTGDRLSMHYTGKLEDGTEFDSSIPRKQTFDFTLGAGQVIKGWDQGLLNMCEGEKRKLVIPSNLGYGDRGSPPKIPGGATLIFEVELIKINRKESDEL

SEQ ID NO: 4400 - DNA, 327 bp, Drosophila pseudoobscura pseudoobscura
  CDS (1)..(327)
atgggcgtacaagttgttccaatttctcccggtgacggcagcacattccccaagaacggccaaaaagtcgtggtgcactacaccggaaccttggacgatggcaccaagttcgattcgtcgcgcgaccgcaacaagccctttaagttcaccatcggcaagggcgaagtcatccgcggctgggacgagggcgttgctcagttgagcgtgggccagcgcgccaagctcatctgctccccggactacgcctacggcagccgtggacacccaggagtcatcccccccaactcgacccttactttcgacgtcgagttgctcaaggtcgaataa

SEQ ID NO: 4401 - protein, 108 aa, Drosophila pseudoobscura pseudoobscura
MGVQVVPISPGDGSTFPKNGQKVVVHYTGTLDDGTKFDSSRDRNKPFKFTIGKGEVIRGWDEGVAQLSVGQRAKLICSPDYAYGSRGHPGVIPPNSTLTFDVELLKVE

SEQ ID NO: 4402 - DNA, 327 bp, Nasonia vitripennis (jewel wasp)
  CDS (1)..(327)
atgggcgtgaatgtcgaggttctatctcccggagacggacaaacctaccccaaaacaggacaaactgtcgttgtccattacacaggtactctggctaatggaaagaaattcgactctagcagagaccgtggagttcctttcaagttcaaaatcggcaagggtgaggtaatcaagggctgggatcaaggagttgctcaaatgtgtgttggagagcgtgccaggttaacttgtccaccagaagttgcctatggacctagaggacaccctggcgttataccaccaaatgctacccttatcttcgatgttgagctgttgaaggtggagtga

SEQ ID NO: 4403 - protein, 108 aa, Nasonia vitripennis (jewel wasp)
MGVNVEVLSPGDGQTYPKTGQTVVVHYTGTLANGKKFDSSRDRGVPFKFKIGKGEVIKGWDQGVAQMCVGERARLTCPPEVAYGPRGHPGVIPPNATLIFDVELLKVE

SEQ ID NO: 4404 - DNA, 636 bp, Aedes aegypti (Stegomyia aegypti)
  CDS (1)..(636)
atgatttccaaactgctagtcctgacctgcctggtggctgccgcagtctgcgagtcaaagctgaaggtcgacgtggtcaacgtgccggaaggatgcaccaccaagagcaaaaacggcgacatgctcacgatgcactacaccggcaagctcaccgatggcaccaaattcgattccagctttgaccgcgatcagccattcaccttccagctgggagccggacaggtcatcaagggatgggaccaaggattgaccgatatgtgtgtcggtgaaaagcgtaagctgaccatcccgccagagttgggctacggagatcgcggagccggaaatgtcatccccgggggtgccactctggtgttcgacgtcgagctgatcaacatcggggacaccgcaccgaccaccaacgtgttcaaggagatcgatgagaacaaggacatgcagctgagccgggaggaggtcagcgaatacctgaagaagcagatggtggccgccgacggtggtcaggaatcggaagacatcaaaaacatgatcgccgagcacgacaagctggtggaggaaattttccagcacgaggacaaggacaagaacggctacatctcgcatgacgagttctccggcccgaaacacgacgagctgtaa

SEQ ID NO: 4405 - protein, 211 aa, Aedes aegypti (Stegomyia aegypti)
MISKLLVLTCLVAAAVCESKLKVDVVNVPEGCTTKSKNGDMLTMHYTGKLTDGTKFDSSFDRDQPFTFQLGAGQVIKGWDQGLTDMCVGEKRKLTIPPELGYGDRGAGNVIPGGATLVFDVELINIGDTAPTTNVFKEIDENKDMQLSREEVSEYLKKQMVAADGGQESEDIKNMIAEHDKLVEEIFQHEDKDKNGYISHDEFSGPKHDEL

SEQ ID NO: 4406 - DNA, 327 bp, Aedes aegypti (Stegomyia aegypti)
  CDS (1)..(327)
atgggtgttcaggtcgttacgctagccgccggagacgaggcaacataccccaaggctggccaggtcgccgtcgtgcactacaccggaacgctggccgatggaaaagtgttcgattcgtcccggacccgtggcaagccgttccggttcaccgttggccgcggagaggtcattcgcggatgggatgaaggtgttgcccagatgtctgttggacaacgtgccaagttggtctgctcgccggactacgcttacggcagccgtggccacccaggagtcatcccaccaaatgccaccctcaccttcgacgttgaactgttgagggttgaataa

SEQ ID NO: 4407 - protein, 108 aa, Aedes aegypti (Stegomyia aegypti)
MGVQVVTLAAGDEATYPKAGQVAVVHYTGTLADGKVFDSSRTRGKPFRFTVGRGEVIRGWDEGVAQMSVGQRAKLVCSPDYAYGSRGHPGVIPPNATLTFDVELLRVE

SEQ ID NO: 4408 - DNA, 420 bp, Aedes aegypti (Stegomyia aegypti)
  CDS (1)..(420)
atgagaatctcagcagttcaaacttccatagctttcctgctagcagtggtgtgtttagctgatgccagtgccgaaggaaagctgaaaatcggcgtcaaaaagcgggtagaaaattgcactctccgcaccaagaagggagacttggtgcacatgcactacacgggcacactggaagacgggagcgaattcgacagtagcattccacgtggggaaccactcacgtttacccttggcatgggccaggttatcaagggttgggatcagggtctgctgaatatgtgcgaaggggagaagcgcaagctgatcattcctccggagctgggatacggagcacgcggtgccggtgaaaagatcccacccaattccgtgctggttttcgaggtggaactggtgaaaatcgaacgcaaaacggagctctag

SEQ ID NO: 4409 - protein, 139 aa, Aedes aegypti (Stegomyia aegypti)
MRISAVQTSIAFLLAVVCLADASAEGKLKIGVKKRVENCTLRTKKGDLVHMHYTGTLEDGSEFDSSIPRGEPLTFTLGMGQVIKGWDQGLLNMCEGEKRKLIIPPELGYGARGAGEKIPPNSVLVFEVELVKIERKTEL

SEQ ID NO: 4410 - DNA, 327 bp, Chlamydomonas reinhardtii
  CDS (1)..(327)
atgggtgtcgacgtcgcgactactcgccctggcgatggcgtgagcttccccaagactggccagaccgtgtttgtgcactacacgggcaccctgaccgacggcaagaagttcgacagctcccgcgaccgtggcgagcccttctctttccgcctgggcatgggcgaggtgatcaagggctgggatgagggcgtggcccagatgtccaagggccagcgcgccaccctgaccatcagccacgacttcgcctatggcccccgcggcatccccggcgtgatccctccctcggctaccctggtgttcgatgttgagctgctggactacaagtaa

SEQ ID NO: 4411 - protein, 108 aa, Chlamydomonas reinhardtii
MGVDVATTRPGDGVSFPKTGQTVFVHYTGTLTDGKKFDSSRDRGEPFSFRLGMGEVIKGWDEGVAQMSKGQRATLTISHDFAYGPRGIPGVIPPSATLVFDVELLDYK

SEQ ID NO: 4412 - DNA, 528 bp, Chlamydomonas reinhardtii
  CDS (1)..(528)
atggcactccgcatgcagcgttcgtctgggagcctagctcgggcgggtcccaagtcaacaagccgtcgccttacaacgcacgtgctggcatccggcgctctcaagacttccaaatgcggccttaaatggaaggacgtcgaggagggcactggtgctccgccgcggatgggcaccactatccgctgccactacaacggccgcctcaccaacggcaaggtgtttgactcctcttatgagcgcggcagccccctggacttcccgatcggtgtgggccaggtcatcaagggctgggatattggcatcctgggcaacgaggacatcccgcccatgaaggagggcggcaagcgccttctggtcatcccgcccgagctgggctacggggcccgcggcgccggcggcgtcatcccgcccaacgcggtcctggagttcgacgtcgagctgctgccggcgggcggcggcggcggcggcctgtttggcgcgctggcggagggctggaagaaggcgaccggcttcctgaaggcggtgtag

SEQ ID NO: 4413 - protein, 175 aa, Chlamydomonas reinhardtii
MALRMQRSSGSLARAGPKSTSRRLTTHVLASGALKTSKCGLKWKDVEEGTGAPPRMGTTIRCHYNGRLTNGKVFDSSYERGSPLDFPIGVGQVIKGWDIGILGNEDIPPMKEGGKRLLVIPPELGYGARGAGGVIPPNAVLEFDVELLPAGGGGGGLFGALAEGWKKATGFLKAV

SEQ ID NO: 4414 - DNA, 585 bp, Chlamydomonas reinhardtii
  CDS (1)..(585)
atggccctttgcatgcagacccgcttcgctcgcccgctggctcgctcggcgagccgagtccccgcgcgtctgctcagcactcgcgtcttcgcaggcaagggctcctctgctgcacctgctgataagaacgactccggtgtgctagggcgccgcgagctcggtctcgccttcggcgcggctgcggttttcatgagcacctcttcgtcccctgcctcagcagcggacggcctgaccacctcgaagagcgggctacagtggaaggacgtcgaggagggcaccggcgccgctcccgtcaagggcagcaccatccgctgccactacaacggccgcctcaccaacggcaaggtgtttgactcctcttatgagcgcggccgccccctgtccttccagatcggtgtgggccaggttatcaagggctgggacatgggcatcctgggcgctgaggacatcccgcccatgaaggagggcggcaagcgccttctggtcatcccgcccgagctgggctacggggcccgcggcgccggcggcgtcattccgcccaacgcggtcctggagttcgacgtcgagctgctgccgcgcaagtaa

SEQ ID NO: 4415 - protein, 194 aa, Chlamydomonas reinhardtii
MALCMQTRFARPLARSASRVPARLLSTRVFAGKGSSAAPADKNDSGVLGRRELGLAFGAAAVFMSTSSSPASAADGLTTSKSGLQWKDVEEGTGAAPVKGSTIRCHYNGRLTNGKVFDSSYERGRPLSFQIGVGQVIKGWDMGILGAEDIPPMKEGGKRLLVIPPELGYGARGAGGVIPPNAVLEFDVELLPRK

SEQ ID NO: 4416 - DNA, 459 bp, Chlamydomonas reinhardtii
  CDS (1)..(459)
atggccctttgcatgcagacccgcttcgctcgcccgctggctcgctcggcgagccgagtccccgcgcgtctgctcagcactcgcgtcttcgcagcggacggcctgaccacctcgaagagcgggctacagtggaaggacgtcgaggagggcaccggcgccgctcccgtcaagggcagcaccatccgctgccactacaacggccgcctcaccaacggcaaggtgtttgactcctcttatgagcgcggccgccccctgtccttccagatcggtgtgggccaggttatcaagggctgggacatgggcatcctgggcgctgaggacatcccgcccatgaaggagggcggcaagcgccttctggtcatcccgcccgagctgggctacggggcccgcggcgccggcggcgtcattccgcccaacgcggtcctggagttcgacgtcgagctgctgccgcgcaagtaa

SEQ ID NO: 4417 - protein, 152 aa, Chlamydomonas reinhardtii
MALCMQTRFARPLARSASRVPARLLSTRVFAADGLTTSKSGLQWKDVEEGTGAAPVKGSTIRCHYNGRLTNGKVFDSSYERGRPLSFQIGVGQVIKGWDMGILGAEDIPPMKEGGKRLLVIPPELGYGARGAGGVIPPNAVLEFDVELLPRK

SEQ ID NO: 4418 - DNA, 507 bp, Chlamydomonas reinhardtii
  CDS (1)..(507)
atgccttacatgcgcttgatctgcattgaattgcgcaatggagctactcaatgcgggcgaggtgacggtggtcgcccccattcctgccagttgcaggcgagccgagtccccgcgcgtctgctcagcactcgcgtcttcgcagcggacggcctgaccacctcgaagagcgggctacagtggaaggacgtcgaggagggcaccggcgccgctcccgtcaagggcagcaccatccgctgccactacaacggccgcctcaccaacggcaaggtgtttgactcctcttatgagcgcggccgccccctgtccttccagatcggtgtgggccaggttatcaagggctgggacatgggcatcctgggcgctgaggacatcccgcccatgaaggagggcggcaagcgccttctggtcatcccgcccgagctgggctacggggcccgcggcgccggcggcgtcattccgcccaacgcggtcctggagttcgacgtcgagctgctgccgcgcaagtaa

SEQ ID NO: 4419 - protein, 168 aa, Chlamydomonas reinhardtii
MPYMRLICIELRNGATQCGRGDGGRPHSCQLQASRVPARLLSTRVFAADGLTTSKSGLQWKDVEEGTGAAPVKGSTIRCHYNGRLTNGKVFDSSYERGRPLSFQIGVGQVIKGWDMGILGAEDIPPMKEGGKRLLVIPPELGYGARGAGGVIPPNAVLEFDVELLPRK

SEQ ID NO: 4420 - DNA, 393 bp, Chlamydomonas reinhardtii
  CDS (1)..(393)
atggctgccattcataagctggccaccgtggccgtggtttgcgctcttttcgcgggcgcctttgccgaggacctgaagatcaaggtcgagcacctgcccacggactgcgccgtgaaggctaaggccggcgaccgcgtggctgtgcactatgcgggccgcctggaggacggcaaggagttcgacaactcgttcaagcgcggcgagcccatcaagttcaccctgggcgagggccaggtcatcaagggctgggaccagggcgtggagggcatgtgcgcgggcgagaagcgccacctgcgcattcccccccacctgggctacggcgagcgcggcatcggccccatccccggcggtgccaccctgctgttcgatgtggagctggttaagatcaactaa

SEQ ID NO: 4421 - protein, 130 aa, Chlamydomonas reinhardtii
MAAIHKLATVAVVCALFAGAFAEDLKIKVEHLPTDCAVKAKAGDRVAVHYAGRLEDGKEFDNSFKRGEPIKFTLGEGQVIKGWDQGVEGMCAGEKRHLRIPPHLGYGERGIGPIPGGATLLFDVELVKIN

SEQ ID NO: 4422 - DNA, 339 bp, Physcomitrella patens subsp. patens
  CDS (1)..(339)
atggggtacgagaaagaaatcatccggcccgggaacggcgtgaaacctaaccgcggccaaaccgtcactgtccactgcaccggctatggcaagaatagggacctgaatgagaagttctggagtacaaaggaccctggccagaagcccttccagtttgagttagggatgggtcgagtgatcaaaggttgggatgaaggtgtgatgagcatgagcattggcgaaattgctcgtctcaagtgctcacctgactatgcttacggatcagggggttttccggcatggggaatcatgccaaactcggtgctcgtttttgaaatcgagatggatattcctatataa

SEQ ID NO: 4423 - protein, 112 aa, Physcomitrella patens subsp. patens
MGYEKEIIRPGNGVKPNRGQTVTVHCTGYGKNRDLNEKFWSTKDPGQKPFQFELGMGRVIKGWDEGVMSMSIGEIARLKCSPDYAYGSGGFPAWGIMPNSVLVFEIEMDIPI

SEQ ID NO: 4424 - DNA, 513 bp, Physcomitrella patens subsp. patens
  CDS (1)..(513)
atggcgaacttgagggcggcattgttgtggattgttgcgtgtttggcgattgcagctgttgttgatggaaaagttgagaaagaagtgacggagcttcagattggggtgaaatttaaacccaagagctgcgagttgaaggcgcataagggcgactccgttagtgtgcattaccgcggcacgctcaccgatgggacattgttcgatgagagttatggtagaggccagccacttgatttcaagctagggcaggggtccgttattaagggctgggatcagggcattctcggaatgtgtgttggggagaagcggaagttgaagattccggccaagcttggctatggcgctcaaggtgccccgcccaagatcccaggtggtgcaacgctgatcttcgagactgaacttatgtctgtgaatggcagaactgggaccggccccgaggatgttgtggatcccccaatggatctgtctgtcgacgatgaggagtttggaaccgatgatgacgaggaattgtag

SEQ ID NO: 4425 - protein, 170 aa, Physcomitrella patens subsp. patens
MANLRAALLWIVACLAIAAVVDGKVEKEVTELQIGVKFKPKSCELKAHKGDSVSVHYRGTLTDGTLFDESYGRGQPLDFKLGQGSVIKGWDQGILGMCVGEKRKLKIPAKLGYGAQGAPPKIPGGATLIFETELMSVNGRTGTGPEDVVDPPMDLSVDDEEFGTDDDEEL

SEQ ID NO: 4426 - DNA, 339 bp, Coprinopsis cinerea okayama7#130 (Coprinus cinereus okayama7#130)
  CDS (1)..(339)
atgggcgtcactatcgaaactcttgttccaggcgacggcaagaccttccccaagaagggtgacaaggttaccattcactacgttggtactctgctcgatggctccaagttcgactctagtcgcgaccgtggctcacccttcgagacggaaattggtgtcggaaaggtgattctgggctgggatgaaggcgtcccgcaactatcactcggacagaaggccgtcttgacggcctctccggattatgcctatggcagccgcggcttccctcctgtgatacctcccaactcgacactcaaattcgaggttgaactcttgaagatcaacggcgttgggaagtaa

SEQ ID NO: 4427 - protein, 112 aa, Coprinopsis cinerea okayama7#130 (Coprinus cinereus okayama7#130)
MGVTIETLVPGDGKTFPKKGDKVTIHYVGTLLDGSKFDSSRDRGSPFETEIGVGKVILGWDEGVPQLSLGQKAVLTASPDYAYGSRGFPPVIPPNSTLKFEVELLKINGVGK

SEQ ID NO: 4428 - DNA, 432 bp, Coprinopsis cinerea okayama7#130 (Coprinus cinereus okayama7#130)
  CDS (1)..(432)
atgcgtctcctcggttggtttgcctcgctcatgtttgccggcgccgctttggctgccaaggaagcacctaaggagcttcaaatcgagacgaccttcacgcctgaggactgctcggtcaaggctaagactggggacaacctcgaggttcactatactggtactttgttcgccactggaaagaaattcgactcaagccacgaccgcggcacaccccttcctcttaaactcggtgttggtcaggtcatcaagggctgggacgacggtttgcaaggcatgtgcgttggcgagaagcgagttctcactatccccgcacacttggcatacggtgaacgatcaattggcgacattatccccgccaactctgcattggtattcgagactgagctcgtctacctcgaccctaaggatgctgcacccaaggatgaactgtaa

SEQ ID NO: 4429 - protein, 143 aa, Coprinopsis cinerea okayama7#130 (Coprinus cinereus okayama7#130)
MRLLGWFASLMFAGAALAAKEAPKELQIETTFTPEDCSVKAKTGDNLEVHYTGTLFATGKKFDSSHDRGTPLPLKLGVGQVIKGWDDGLQGMCVGEKRVLTIPAHLAYGERSIGDIIPANSALVFETELVYLDPKDAAPKDEL

SEQ ID NO: 4430 - DNA, 408 bp, Culex quinquefasciatus (southern house mosquito)
  CDS (1)..(408)
atgaaactctccgttgcactggtgctggtggccaccgccgccgtctgctacgccagctccgagggcaagctgaagatcggcgtgaaaaagcgggtggaaaactgcaccgtgcggacgaaaaagggcgacctggtgcatatgcactacacgggaacgttggaggacggaactgagtttgatagcagcatcccgcgggggcagccgctttcgttcacgctggggatgggtcaggttattaaaggttgggaccagggcttgctgaacatgtgcgagggtgagaaacggaagctggtaattccgccggagttgggttatggggagcgtggtgctggggacaagattccgccgaactcggtgctgatcttcgaggtggagctggtcaagatcgagcggaagacggagctgtag

SEQ ID NO: 4431 - protein, 135 aa, Culex quinquefasciatus (southern house mosquito)
MKLSVALVLVATAAVCYASSEGKLKIGVKKRVENCTVRTKKGDLVHMHYTGTLEDGTEFDSSIPRGQPLSFTLGMGQVIKGWDQGLLNMCEGEKRKLVIPPELGYGERGAGDKIPPNSVLIFEVELVKIERKTEL

SEQ ID NO: 4432 - DNA, 327 bp, Acyrthosiphon pisum (pea aphid)
  CDS (1)..(327)
atgggcgtcgacgtcacattcctggccgaaggagacggtgccactttcccgaaacgaggccagaccgtcaccgtgcactatacaggtacattgactgatggcaagaaatttgactcgtcacgcgaccgtaataagcctttcaagttcaagattggaaagggagaagttatcaaaggttgggatgaaggagttgcccagatgagtattggttctcgtgccaagctgacatgtactccagattatgcctatggagctctgggacatcctggtgtcattccgccaaatgctactttgatttttgatgttgaactcatcaaatgcgaataa

SEQ ID NO: 4433 - protein, 108 aa, Acyrthosiphon pisum (pea aphid)
MGVDVTFLAEGDGATFPKRGQTVTVHYTGTLTDGKKFDSSRDRNKPFKFKIGKGEVIKGWDEGVAQMSIGSRAKLTCTPDYAYGALGHPGVIPPNATLIFDVELIKCE

SEQ ID NO: 4434 - DNA, 687 bp, Acyrthosiphon pisum (pea aphid)
  CDS (1)..(687)
atgaggagcagctggttacgcgcgttggccgcggtgtgcgccgccgtggcgctggcccaggccgccgaaccgcagcagcaacaaggccagtctgagacgctggccaacggtctgaagatcgagtacgtgtacacgttggatggatgcgagcccaagtccaagaataacgacatgctcaccatgcactacaccggcaagctggtggacggcaccaagttcgattcgagtcatgaccgagaccagccattcactttccaattgggcgtgggacaagtgatcaagggatgggatttgggattgaccaaaatgtgcgtcggtgaaaagaggaggctgaccataccagccaatctagcttacggcgaccgcggagccggaaacgtcattcccggaggagccactttggtgttcgacgtcgagctgttgaacgttggcgaccaagcgcccaccacaaacgtgttcaaggaaatcgaccaggaccaggacaaacagctgtccagggacgaggtgagtgaatatctgaaaaagcagatggcagcggccgagggcgcggagggtggtgatgacatcaagcagatgatgtccgaccacgagaagcttgtcgaggaaatattccaacacgaggacaaggacaagaacgggttcatatcgcatgacgagttcaccgggcccaagcacgacgagctttga

SEQ ID NO: 4435 - protein, 228 aa, Acyrthosiphon pisum (pea aphid)
MRSSWLRALAAVCAAVALAQAAEPQQQQGQSETLANGLKIEYVYTLDGCEPKSKNNDMLTMHYTGKLVDGTKFDSSHDRDQPFTFQLGVGQVIKGWDLGLTKMCVGEKRRLTIPANLAYGDRGAGNVIPGGATLVFDVELLNVGDQAPTTNVFKEIDQDQDKQLSRDEVSEYLKKQMAAAEGAEGGDDIKQMMSDHEKLVEEIFQHEDKDKNGFISHDEFTGPKHDEL

SEQ ID NO: 4436 - DNA, 327 bp, Drosophila erecta
  CDS (1)..(327)
atgggcgtacaagtggttccaattgctcctggtgatggcagcaccttccccaagaatggccaaaaggtcacggtccactacaccggcaccctggacgatggcaccaagtttgactcgtcgcgcgaccgcaacaagcccttcaagttcaccattggcaagggcgaggtcatccgtggctgggacgagggagttgcccagttgagcgtcggccagcgcgccaagctgatctgctcgccggattatgcctacggaagccgtggccaccccggcgtcattccgcccaactccaccctcaccttcgacgtcgagctgctcaaggtcgaatag

SEQ ID NO: 4437 - protein, 108 aa, Drosophila erecta
MGVQVVPIAPGDGSTFPKNGQKVTVHYTGTLDDGTKFDSSRDRNKPFKFTIGKGEVIRGWDEGVAQLSVGQRAKLICSPDYAYGSRGHPGVIPPNSTLTFDVELLKVE

SEQ ID NO: 4438 - DNA, 696 bp, Drosophila erecta
  CDS (1)..(696)
atgaataactttttggaacatatttcggtgtaccgttattcccccatgtcgaaatccattctcgttttgtcgtgccttctgctggtggccatcagcaacagcctggtccaggctgaggatctcaaagtggatgtgatcagcacgccggaggtctgcgaacagaagtccaagaatggcgattcccttaccatgcactacactggaaccctgcaggccgatggcaagaagttcgactcgagcttcgaccgcgaccagcccttcacattccaattgggcgccggccaggtgattaagggctgggatcagggtctgctcaacatgtgcgtgggtgagaagcgcaagctgaccattcctccccagctgggctacggtgaccagggtgccggcaacgtgatcccgcccaaggccaccctcctcttcgacgtggagctgatcaacatcggcaacgccccgcccaccaccaacgtgttcaaggagatcgacgataacgccgacaagcagctgagtcgcgaagaggtcagcgagtatctgaagaagcagatgaccgccgtcgagggacaggattccgatgagctgaagaacatgctggccgaaaacgacaagctggtggaggagatcttccagcacgaggataaggacaagaacggcttcatctcgcacgacgagttctccggacccaaacacgacgagctgtag

SEQ ID NO: 4439 - protein, 231 aa, Drosophila erecta
MNNFLEHISVYRYSPMSKSILVLSCLLLVAISNSLVQAEDLKVDVISTPEVCEQKSKNGDSLTMHYTGTLQADGKKFDSSFDRDQPFTFQLGAGQVIKGWDQGLLNMCVGEKRKLTIPPQLGYGDQGAGNVIPPKATLLFDVELINIGNAPPTTNVFKEIDDNADKQLSREEVSEYLKKQMTAVEGQDSDELKNMLAENDKLVEEIFQHEDKDKNGFISHDEFSGPKHDEL

SEQ ID NO: 4440 - DNA, 327 bp, Drosophila grimshawi
  CDS (1)..(327)
atgggcgtacaagttgttccaattacacccggcgatggtagcacctacccaaagaatggccaaaaagtatcggtgcactacacgggcaccttggacgacggcaccaagtttgattcgtcgcgggatcgcaataagccctttaaattcaccattggcaagggcgaagttattcgtggctgggatgagggcgttgctcagctcagtgttggacaacgtgccaagttgatctgttcgccggattatgcgtacggcagtcgcggtcatcccggtgtcattccccccaactccaccttgacttttgatgtcgagttgctcaaggtcgaataa

SEQ ID NO: 4441 - protein, 108 aa, Drosophila grimshawi
MGVQVVPITPGDGSTYPKNGQKVSVHYTGTLDDGTKFDSSRDRNKPFKFTIGKGEVIRGWDEGVAQLSVGQRAKLICSPDYAYGSRGHPGVIPPNSTLTFDVELLKVE

SEQ ID NO: 4442 - DNA, 327 bp, Drosophila mojavensis
  CDS (1)..(327)
atgggcgtacaagttgttccaatttcccccggcgatggtagcaccttcccaaagaacggccagaaagtttcagtgcattacactggcacattggacgatggcaccaagttcgattcatctcgggaccgcaacaagcctttcaagttcaccattggcaagggtgaggttattcgcggctgggatgagggcgttgctcagctgagcgttggccagcgggccaagttgatctgctcacctgactacgcctatggcagccgtggccatccaggtgtcattcctcccaattctaccttgactttcgacgttgaattgctcaaggtcgaataa

SEQ ID NO: 4443 - protein, 108 aa, Drosophila mojavensis
MGVQVVPISPGDGSTFPKNGQKVSVHYTGTLDDGTKFDSSRDRNKPFKFTIGKGEVIRGWDEGVAQLSVGQRAKLICSPDYAYGSRGHPGVIPPNSTLTFDVELLKVE

SEQ ID NO: 4444 - DNA, 327 bp, Drosophila virilis
  CDS (1)..(327)
atgggtgtacaagttgttccaatttcagccggcgatggcagtaccttccccaagaatggccaaaaagtttcggtgcattacactggcactttggacgatggaaccaagtttgattcgtctcgggaccgcaacaagccgttcaaattcaccattggcaagggcgaagttattcgcggctgggatgagggcgttgctcagctgagcgttggccaacgggccaagctgatctgctcacctgactacgcctacggcagccgaggccatccaggtgtcattccccctaacgctaccttgactttcgatgtcgaattgctcaaggtcgaataa

SEQ ID NO: 4445 - protein, 108 aa, Drosophila virilis
MGVQVVPISAGDGSTFPKNGQKVSVHYTGTLDDGTKFDSSRDRNKPFKFTIGKGEVIRGWDEGVAQLSVGQRAKLICSPDYAYGSRGHPGVIPPNATLTFDVELLKVE

SEQ ID NO: 4446 - DNA, 327 bp, Drosophila willistoni
  CDS (1)..(327)
atgggcgtacaagtagttccaatttctcccggtgatggcagcacctatcccaagaatggccaaaaggtatcggttcactataccggaactttggacgatggtaccaagtttgattcttctcgggatcgcaacaagccattcaagttcaccattggcaagggtgaagtgatccgtggctgggatgaaggtgtagcccaattgagtgttggccaacgtgccaagctgatctgttcccccgactatgcctatggcagtcgcggacatccaggtgtcattccacccaactccaccctaactttcgatgtggagctgctcaaggtcgaatag

SEQ ID NO: 4447 - protein, 108 aa, Drosophila willistoni
MGVQVVPISPGDGSTYPKNGQKVSVHYTGTLDDGTKFDSSRDRNKPFKFTIGKGEVIRGWDEGVAQLSVGQRAKLICSPDYAYGSRGHPGVIPPNSTLTFDVELLKVE

SEQ ID NO: 4448 - DNA, 414 bp, Drosophila simulans
  CDS (1)..(414)
atgggcgtacaagtggttccaattgctcctggtgatggcagcacctatcccaagaatggccaaaaggtcacggtccactacaccggcaccctggacgacggcaccaagttcgattcgtcgcgcgaccgcaacaagcccttcaagttcaccatcggcaagggcgaggtcatccgtggctgggatgagggagttgcccagttgagcgtcggccagcgcgccaagctgatctgctcgccggactatgcctacggtagccgtgccaccccgcgtcattccgcccaactccaccctcacattcgacgtcgagctgctcaaggtcgaataggcgcacaggatgcccaatgtgtatacccccaaccaaatcgcagggggttgcggaccggcgcaccggcgacgagccgaataacatcataa

SEQ ID NO: 4449 - protein, 137 aa, Drosophila simulans
MGVQVVPIAPGDGSTYPKNGQKVTVHYTGTLDDGTKFDSSRDRNKPFKFTIGKGEVIRGWDEGVAQLSVGQRAKLICSPDYAYGSRATPRHSAQLHPHIRRRAAQGRIGAQDAQCVYPQPNRRGLRTGAPATSRITS

SEQ ID NO: 4450 - DNA, 696 bp, Drosophila yakuba
  CDS (1)..(696)
atgaacaactttttggaatatatttcggtgtggcattattcccccatgtcgaaatccattctcgttttctcgtgccttctgctggtggccatcagcaacagcctggtccaggctgaggatctgaaagtggacgtgatcagcacgccggaggtgtgcgaacagaagtccaagaatggcgattccctcaccatgcactacactggaactctgcaggccgatggcaagaagttcgactcaagcttcgaccgcgaccagcccttcacattccaattgggcgccggccaggtgattaagggttgggatcagggtctgctgaacatgtgcgtgggtgagaagcgcaagctgaccattcctccccagctgggctacggtgaccagggtgccggcaacgtgatcccacccaaggccacccttctcttcgacgtggagctgatcaacatcggcaacgccccgcccaccaccaacgtgttcaaggagatcgacgataacgccgacaagcagctgagtcgcgaagaggtcagcgagtatctgaagaagcagatgaccgccgtggagggacaggattccgatgagctgaagaacatgctggctgagaacgacaagcttgtggaggagatcttccagcacgaggataaggacaagaacggcttcatctcgcacgaggagttctccggacccaaacacgacgagctgtag

SEQ ID NO: 4451 - protein, 231 aa, Drosophila yakuba
MNNFLEYISVWHYSPMSKSILVFSCLLLVAISNSLVQAEDLKVDVISTPEVCEQKSKNGDSLTMHYTGTLQADGKKFDSSFDRDQPFTFQLGAGQVIKGWDQGLLNMCVGEKRKLTIPPQLGYGDQGAGNVIPPKATLLFDVELINIGNAPPTTNVFKEIDDNADKQLSREEVSEYLKKQMTAVEGQDSDELKNMLAENDKLVEEIFQHEDKDKNGFISHEEFSGPKHDEL

SEQ ID NO: 4452 - DNA, 327 bp, Drosophila yakuba
  CDS (1)..(327)
atgggcgtacaagtggttccaattgctaatggtgatggcagcaccttccccaagaatggccaaaaggtcacggtccactacaccggcaccctggacgatggcaccaagttcgattcgtcgcgcgaccgcaacaagcccttcaagttcaccatcggcaagggcgaggtcatccgtggctgggatgagggagttgcccagttgagcgttggacagcgcgccaagctgatctgctcgccggattatgcctacggaagtcgtggccaccccggcgtcattccgcccaactccaccctcaccttcgacgtcgagctactcaaggtcgaatag

SEQ ID NO: 4453 - protein, 108 aa, Drosophila yakuba
MGVQVVPIANGDGSTFPKNGQKVTVHYTGTLDDGTKFDSSRDRNKPFKFTIGKGEVIRGWDEGVAQLSVGQRAKLICSPDYAYGSRGHPGVIPPNSTLTFDVELLKVE

SEQ ID NO: 4454 - DNA, 327 bp, Anopheles gambiae str. PEST
  CDS (1)..(327)
atgggtgtacagattgtcccaattgccaacggtgaccagaccaccttccccaagccgggtcaaacggcggtcgtccactacaccggcacgctcgacgatggtacggtgttcgattcgtcgcgcacccgcggcaagccgttcaagttctcggtcggcaagggcgaggtgatccgcggctgggacgaaggcgtcgcccagatgtcggtcggccagcgtgccaagctggtgtgctcgccggactacgcctacggtagccgtggccacccgggtgtcatcccaccgaacgctcggttgaccttcgacgtggagctgctgcgagtagaataa

SEQ ID NO: 4455 - protein, 108 aa, Anopheles gambiae str. PEST
MGVQIVPIANGDQTTFPKPGQTAVVHYTGTLDDGTVFDSSRTRGKPFKFSVGKGEVIRGWDEGVAQMSVGQRAKLVCSPDYAYGSRGHPGVIPPNARLTFDVELLRVE

SEQ ID NO: 4456 - DNA, 342 bp, Magnaporthe grisea 70-15
  CDS (1)..(342)
atgggtgttacaaagaccacaacacagcagggcactggtcccagcccccaggtgggccagaccgtcgtcatcgagtacactggcttccttaaggacaccagcaagcctgacaacaagggcgcccagttcgactcttccgtgggcaggggcgacttcgagacggctatcggtgttcagcgtgtcatcaagggctgggacgagggtgtcgtttccatgaaagttggcgagaaggccactctggacattactgctgactacggctacggagcccgtggcttccccggtgccatcccgcccaactcggacctcatcttcgatgtctacctgaagggaatcaaatag

SEQ ID NO: 4457 - protein, 113 aa, Magnaporthe grisea 70-15
MGVTKTTTQQGTGPSPQVGQTVVIEYTGFLKDTSKPDNKGAQFDSSVGRGDFETAIGVQRVIKGWDEGVVSMKVGEKATLDITADYGYGARGFPGAIPPNSDLIFDVYLKGIK

SEQ ID NO: 4458 - DNA, 441 bp, Gibberella zeae PH-1 (anamorph: Fusarium graminearum)
  CDS (1)..(441)
atgcggcctttctctcttgcatccatccctcgcgctactcgtatcactactcgaatcaacccgttttttactcaacctcgaaacttctcctttacacaagcaaccatgggcgttgaaaagactattatcacgcagggtagcggcccttccccccaggttggccagaaggtcaccatggagtacactggctggctccagaaggaggacggtaccaagggcgaccagttcgatacctctgtcggacgcggcgactttgttgtcaacattggcgttggccaggtcatcaagggttgggacgagggtgtcacccagatgaagcttggcgagaaggctactctccacatctcccctgactacggctacggtcctcgcggcttccccggtgccatcccccccaactctactctcatcttcgacgtcgagctcaagaagatcggttaa

SEQ ID NO: 4459 - protein, 146 aa, Gibberella zeae PH-1 (anamorph: Fusarium graminearum)
MRPFSLASIPRATRITTRINPFFTQPRNFSFTQATMGVEKTIITQGSGPSPQVGQKVTMEYTGWLQKEDGTKGDQFDTSVGRGDFVVNIGVGQVIKGWDEGVTQMKLGEKATLHISPDYGYGPRGFPGAIPPNSTLIFDVELKKIG

SEQ ID NO: 4460 - DNA, 330 bp, Apis mellifera (honey bee)
  CDS (1)..(330)
atgggcgtggatgtggaagttctttctcctggagacggccagacatatccaaaaactggacagactgtagttgttcattatacaggtactcttgacaatggaaaaaaatttgattcaagtagggaccgtggagtaccatttaaatttaaaataggtaaaggagaagttattaaaggttgggaccaaggagttgctaaaatgtgtgttggagaacgtgctaggttaacttgttcgccagattttgcctatggtagccgaggacatcctggagttattcctccaaatgctgttctcatctttgatgtggaattattgaaggtggagccttga

SEQ ID NO: 4461 - protein, 109 aa, Apis mellifera (honey bee)
MGVDVEVLSPGDGQTYPKTGQTVVVHYTGTLDNGKKFDSSRDRGVPFKFKIGKGEVIKGWDQGVAKMCVGERARLTCSPDFAYGSRGHPGVIPPNAVLIFDVELLKVEP

SEQ ID NO: 4462 - DNA, 336 bp, Aspergillus nidulans FGSC A4
  CDS (1)..(336)
atgggtgtcgaagttcagcgcatttctccaggtgacggcaagaatttccccaagcccggggacactgtcagcatccactacaccggaaccctggccgacggtagcaaatttgacagctcccgcgatcgccccggcacctttgtcacccagattggtgttggccgtgtcatcaagggctgggacgagggtgttctccagctgagcgttggcgaaaaggccaagttgatctgtactccggattacgcctacggcgctcgtggtttccctcccgtcattcctcccaacgctaccctgaccttccagagtagcgaggttgagcttctcaagatcaactaa

SEQ ID NO: 4463 - protein, 111 aa, Aspergillus nidulans FGSC A4
MGVEVQRISPGDGKNFPKPGDTVSIHYTGTLADGSKFDSSRDRPGTFVTQIGVGRVIKGWDEGVLQLSVGEKAKLICTPDYAYGARGFPPVIPPNATLTFQSSEVELLKIN

SEQ ID NO: 4464 - DNA, 345 bp, Aspergillus nidulans FGSC A4
  CDS (1)..(345)
atggggatcattgactttatcatagatattatccgtcctggtaatggcgtagactatccaaaaccaggggatatggtcaccgttcactatcacggctacctgtatgacccgactcggtcgtggaatcgcggacgacggtttgacagcagcatcaagcgcggcagaccttttaccttccaggtcggcatgggtcaagttatcaaaggatgggacatcggaattctgcgaatgagcttgggcgagaaatctttgctcacatttggaccacattacggctacggcgaaaacaacgtcgaactcctggctatcaacgggaagactctacagtctgatagttccgagtag

SEQ ID NO: 4465 - protein, 114 aa, Aspergillus nidulans FGSC A4
MGIIDFIIDIIRPGNGVDYPKPGDMVTVHYHGYLYDPTRSWNRGRRFDSSIKRGRPFTFQVGMGQVIKGWDIGILRMSLGEKSLLTFGPHYGYGENNVELLAINGKTLQSDSSE

SEQ ID NO: 4466 - DNA, 741 bp, Ustilago maydis 521
  CDS (1)..(741)
atggtccagatcgaacgcattactcctggtgacggcaagacgtttcccaaaccgggtgacactgtgactatgcactacactggcacgcttgctaagaacggtagcgagttcgactcgtcgcgcaagcctggtcgtgatgctttccagacgcagatcggcgttggtcgcgtgattcagggctgggatcagggtgttccgcaattgagcctcggtgaacgagccaagttgatcatcccgagcaatgagggttacggctcgcagggcgccgctggcgtcatcccccctaacgccgatttgatcttcgacgtcgaactgctcgctatcaacggaaagcgcgtatcacgcactcactttctcacccccactttctccctcactaccccgatccgccaacagcttgatactcccgttccttacatcaacacccgtctccataaacttccaatcatcccacccgttgtacactcatgtaaacttcccgcttcccgcttcccgcttcccgctccccgtcctctctgctgtttcacatcgaatcaaacaatccattctcacttaaccccacaccttgcgaatatgagtgtgatgcgtccgcaattgctccctcacgtcgcattcacgattgcttgtgagcgagcacggttcgctacgcgactgtggactggcatttcgattaaggtgagcaagactactgaaaacactggtgagaacaaccctgtcaagggtaaggaacgaagcacgtga

SEQ ID NO: 4467 - protein, 246 aa, Ustilago maydis 521
MVQIERITPGDGKTFPKPGDTVTMHYTGTLAKNGSEFDSSRKPGRDAFQTQIGVGRVIQGWDQGVPQLSLGERAKLIIPSNEGYGSQGAAGVIPPNADLIFDVELLAINGKRVSRTHFLTPTFSLTTPIRQQLDTPVPYINTRLHKLPIIPPVVHSCKLPASRFPLPAPRPLCCFTSNQTIHSHLTPHLANMSVMRPQLLPHVAFTIACERARFATRLWTGISIKVSKTTENTGENNPVKGKERST

SEQ ID NO: 4468 - DNA, 405 bp, Cryptococcus neoformans var. neoformans B-3501A
  CDS (1)..(405)
atgttcagatctatcctcaccacctctcgtcccctcgttagacaacctcttcgtcaatttactaccacagctatcaaaatgggcgttactgttgagaacatttccgccggtgacggcaagaccttcccccagcctggagacagtgtcactatccactacgttggcactcttcttgacggttccaagtttgactcttctcgagaccgtggaacccccttcgtctgccgaattggtcagggccaagtgatcaggggttgggacgagggtgttcctcagctctccatcggccagaaggctaacctcatctgcacccctgactacgcctacggtgctcgaggtttcccccctgttatcccccctaactctaccctgaagttcgaggttgagctcctcaagatcaactaa

SEQ ID NO: 4469 - protein, 134 aa, Cryptococcus neoformans var. neoformans B-3501A
MFRSILTTSRPLVRQPLRQFTTTAIKMGVTVENISAGDGKTFPQPGDSVTIHYVGTLLDGSKFDSSRDRGTPFVCRIGQGQVIRGWDEGVPQLSIGQKANLICTPDYAYGARGFPPVIPPNSTLKFEVELLKIN

SEQ ID NO: 4470 - DNA, 327 bp, Tribolium castaneum (red flour beetle)
  CDS (1)..(327)
atgggcgtccaagtcgatacaatctcacccggcgatggtcaaaccttcccaaagaccggtcaaaccgtcgtcgttcactatacgggtactctagaaaatggcacaaaattcgactcctcacgggacagaggtgtgcccttcaagttcagaattggaaagggcgaagtcatcaagggctgggacgaaggagtagcgcaattgagtgtgggtcaaagggcgaagttgacgtgttcccctgactacgcttatgggtctcgtggtcatccaggcatcatcccgccaaactccactttgattttcgacgtagaacttctcaaagtcgaataa

SEQ ID NO: 4471 - protein, 108 aa, Tribolium castaneum (red flour beetle)
MGVQVDTISPGDGQTFPKTGQTVVVHYTGTLENGTKFDSSRDRGVPFKFRIGKGEVIKGWDEGVAQLSVGQRAKLTCSPDYAYGSRGHPGIIPPNSTLIFDVELLKVE

SEQ ID NO: 4472 - DNA, 651 bp, Tribolium castaneum (red flour beetle)
  CDS (1)..(651)
atgttcaagtttacgttaatcgcgttggcggcgatcggcctagccgcctccgatgataaaaccaaaaacgatcaactcaaaattgacgtgatcagcgtgcctgaaggctgtgaagttaagtcgaaaaatggggacatgttgaccatgcactacacgggcactctcaccgatggcaccaagtttgactccagcatggaccgtgaccagcccttcagcttccaactgggcgttgggcaagtgatcaagggctgggaccaaggcctgctcaacatgtgcgttggcgagaagcgcaaactgaccatcccacccagcctgggctacggcgaccgtggcgctggaagcgtgatcccaggtggcgccaccctcatcttcgaggtggaactaatcaacatcggggactccccgccgaccaccaacgtcttcaaggagatcgacaacgacaaggacaatcagctgagtcgagaggaagtgagcgagtacttgaagaagcagatggtggcagccgagggcgaaacgcccagcgaggaaatgaagaatatgctcgcagaccatgacaagttggtcgaggagatcttccagcatgaagataaagacaagaatggctttatctcgcatgatgagttctcgggacccaaacacgacgaattgtaa

SEQ ID NO: 4473 - protein, 216 aa, Tribolium castaneum (red flour beetle)
MFKFTLIALAAIGLAASDDKTKNDQLKIDVISVPEGCEVKSKNGDMLTMHYTGTLTDGTKFDSSMDRDQPFSFQLGVGQVIKGWDQGLLNMCVGEKRKLTIPPSLGYGDRGAGSVIPGGATLIFEVELINIGDSPPTTNVFKEIDNDKDNQLSREEVSEYLKKQMVAAEGETPSEEMKNMLADHDKLVEEIFQHEDKDKNGFISHDEFSGPKHDEL

SEQ ID NO: 4474 - DNA, 573 bp, Prochlorococcus marinus str. AS9601
  CDS (1)..(573): transl_table=11
gtgagagaagtctttattagttttgcagtttttgttttttgtgtttcattaactcttttcagtcaatttaattcacctcaagttgttaatgctgctgaatcagaaattcagtcagttcaaagatcacctgttgcaaaatcatcaaatgtctcaaataataatttatttgaactagacccatcagatccaaatcctatacttttcgctatggcagaagaaacaccatcagacaacaattcaaggactacagaaagcggtctaattattgcagatatcgtaaacggggaaggagatgaggctagtgctgggcaaacagttactgtaaattacacaggaacgctagaagacgggacacaatttgataccagtattggcagagctccattcagctttccattgggtgctggccgagtaataaagggttgggacgaaggtgtagcaggcatgaaagttggaggcaaaagaaaattaacaatacctccggaacttggttacggatcaagaggagctggaaatgtaattcctgctaatgcgactttaatatttgaagttgaattattaaaagtcaattaa

SEQ ID NO: 4475 - protein, 190 aa, Prochlorococcus marinus str. AS9601
MREVFISFAVFVFCVSLTLFSQFNSPQVVNAAESEIQSVQRSPVAKSSNVSNNNLFELDPSDPNPILFAMAEETPSDNNSRTTESGLIIADIVNGEGDEASAGQTVTVNYTGTLEDGTQFDTSIGRAPFSFPLGAGRVIKGWDEGVAGMKVGGKRKLTIPPELGYGSRGAGNVIPANATLIFEVELLKVN

SEQ ID NO: 4476 - DNA, 573 bp, Prochlorococcus marinus str. MIT 9301
  CDS (1)..(573): transl_table=11
gtgaaagaagtatttattagttttgcaatttttgttttttgtgtttcattaactattttcagtcaatttaattcacctcaagttgttaatgctgctgaatcagaaactcagtcagttcaaagaacacctgttgcaaaatcatcaaatgtctcaaataataatttatttgaactagacccatcagatccaaatcctatacttttcgctatggcagaagaaacaccaatagacattaattcaaggacaacagaaagtggtctaattattgcagatatcgtaaacggggaaggagatgaggctaatgctggccaaacagttaccgtagattacacaggaacactagaagacgggacacaatttgataccagtataggcagagctccattcagctttcccttgggtgctggacgagtaataaaaggttgggacgaaggtgtagcaggtatgaaagttggaggcaaaagaaaattaacaatacctccggaacttggatacgggaaaagaggagctggaaatgtaatacctgctaatgcgacattaatatttgaagttgaattattaaaagtcaattaa

SEQ ID NO: 4477 - protein, 190 aa, Prochlorococcus marinus str. MIT 9301
MKEVFISFAIFVFCVSLTIFSQFNSPQVVNAAESETQSVQRTPVAKSSNVSNNNLFELDPSDPNPILFAMAEETPIDINSRTTESGLIIADIVNGEGDEANAGQTVTVDYTGTLEDGTQFDTSIGRAPFSFPLGAGRVIKGWDEGVAGMKVGGKRKLTIPPELGYGKRGAGNVIPANATLIFEVELLKVN

SEQ ID NO: 4478 - DNA, 357 bp, Herminiimonas arsenicoxydans
  CDS (1)..(357): transl_table=11
atggctaccacctcgacctcatccggtttgcaatacgaagacaaagttgtcggcgacggcgcagaagcagccgcaggcaatcatgtcaccgtgcattacaccggctggctgcaaaatcctgacggcagcgctggcacaaaattcgattccagcaaggatcgcaatgacccattccagtttccactgggtgcaggccatgtcatcaagggctgggatgaaggcgtgcaaggcatgaaaatcggcggtacccgcaccctgatcattccagcctcgctgggttacggtgcgcgcggcgcaggcggtgtgattccaccgaatgcaaccctgatttttgaagtggaattgctgggcgtataa

SEQ ID NO: 4479 - protein, 118 aa, Herminiimonas arsenicoxydans
MATTSTSSGLQYEDKVVGDGAEAAAGNHVTVHYTGWLQNPDGSAGTKFDSSKDRNDPFQFPLGAGHVIKGWDEGVQGMKIGGTRTLIIPASLGYGARGAGGVIPPNATLIFEVELLGV

SEQ ID NO: 4480 - DNA, 342 bp, Burkholderia vietnamiensis G4
  CDS (1)..(342): transl_table=11
atgtccgtcaccacgaccgcatcgggcctcaaaatcgaagacctgaccgaaggcaccggcgcggaagccgccgcgggccagaccgtcagcgtccactacacgggctggctgaccgacggtcagaaattcgattcgagcaaggaccgcaacgacccgttcgcgttcgtgctcggcggcggcatggtcatcaagggctgggacgaaggcgtgcagggcatgaaggtgggcggcgtgcgtcgcctgacgattccgccccaactcggctacggcccgcgcggcgcaggcggcgtgattccgccgaacgcgacgctcgtgttcgaagtcgagctgctcgccgtctga

SEQ ID NO: 4481 - protein, 113 aa, Burkholderia vietnamiensis G4
MSVTTTASGLKIEDLTEGTGAEAAAGQTVSVHYTGWLTDGQKFDSSKDRNDPFAFVLGGGMVIKGWDEGVQGMKVGGVRRLTIPPQLGYGPRGAGGVIPPNATLVFEVELLAV

SEQ ID NO: 4482 - DNA, 348 bp, Bradyrhizobium sp. ORS278
  CDS (1)..(348): transl_table=11
atgaccactccctccggactgcagatcatcgacaccaaggaaggtaccggcgcgacgcctgcccgcggtcagacctgcgtgatgcactacacgggctggctctatgagaacggccagaagggcaagaaattcgactcctccgtcgatcgcaacgagccgttcgaattcccgatcggcatgaagcgcgtgatcgccggctgggacgagggcgtcgccacgatgaaggtcggcggcaagcgcaccctcatcatcccgccggagctcggctacggcgcccgcggcgccggcggcgtgatcccgccgaatgcgaccttgctgttcgatgtggaattgctgggggtgaagtaa

SEQ ID NO: 4483 - protein, 115 aa, Bradyrhizobium sp. ORS278
MTTPSGLQIIDTKEGTGATPARGQTCVMHYTGWLYENGQKGKKFDSSVDRNEPFEFPIGMKRVIAGWDEGVATMKVGGKRTLIIPPELGYGARGAGGVIPPNATLLFDVELLGVK

SEQ ID NO: 4484 - DNA, 378 bp, Kineococcus radiotolerans SRS30216
  CDS (1)..(378): transl_table=11
atgactgaacgcaccaagcccgagatcgacttccccggcggcgaaccgccgaccgagctcgagatcaccgaccagatcgtcggcgacggcgccgaggccacccccggcaagaccgtcagcgcccactacgtcggcgtggccttcagcaccggcgaggagttcgactcctcctggaaccgcggccagccgctggacttccccgtcggtgccggcatggtcatcaagggctgggaccagggcctgctcggcatgaaggtcggcgggcgccgcaagctcgtcatccccccgcacctcggctacggcgaccgcggcgccggcggggccatcaagggcggggagaccctgatcttcgtcgtcgacctcgtcgacgtgaagtag

SEQ ID NO: 4485 - protein, 125 aa, Kineococcus radiotolerans SRS30216
MTERTKPEIDFPGGEPPTELEITDQIVGDGAEATPGKTVSAHYVGVAFSTGEEFDSSWNRGQPLDFPVGAGMVIKGWDQGLLGMKVGGRRKLVIPPHLGYGDRGAGGAIKGGETLIFVVDLVDVK

SEQ ID NO: 4486 - DNA, 390 bp, Leptospira interrogans serovar Copenhageni str. Fiocruz L1-130
  CDS (1)..(390): transl_table=11
atgaaatttacacgtttaatatttgtcttagctattctttgtgccgtagtagctcctacatttgcagaagatttagttatcaaagaaattcgtattggaactggaaaagaagctttttcgggttcgaatgttacggttcattatgtaggcacattaacgaacggcaagaagttcgatagttccagagacagaaaaaacccttttaccttcaatttgggagcgggagaggtaatcaaaggttgggacagaggggttcgagggatgaaagaaggtgggattcgtaaacttacaattcctccagaattaggttatggttccagaggggccggagctgcgattcctcctaattctactctcatttttgaagttgaattgttgaaagtgtactga

SEQ ID NO: 4487 - protein, 129 aa, Leptospira interrogans serovar Copenhageni str. Fiocruz L1-130
MKFTRLIFVLAILCAVVAPTFAEDLVIKEIRIGTGKEAFSGSNVTVHYVGTLTNGKKFDSSRDRKNPFTFNLGAGEVIKGWDRGVRGMKEGGIRKLTIPPELGYGSRGAGAAIPPNSTLIFEVELLKVY

SEQ ID NO: 4488 - DNA, 573 bp, Prochlorococcus marinus str. MIT 9215
  CDS (1)..(573): transl_table=11
gtgaaagaagtctttattagttttgcagtttttgttttttgtatttcattaactcttttcagtcaatttaattcaccacaagttgttaatgctgccgaatcagaaactcagccagttcaaaaaactcctgttgcaaaatcatcaaatgtttcaaataataatctatttgaactagacccatcagatccaaatcctatacttttcgctatggcagaagaaacacaatcagacagcaattcaaggactacagaaagtggtctaatcattgcagatattgtaaatggcgaaggagatgaagccaacgctggtcaaactgttactgtaaactacacaggtattctagaagacggaacacaatttgatacgagtatcggtagagctccattcagctttcccttaggcgcaggacgagtaataaaaggttgggacgaaggtgttgcaggcatgaaggtaggaggcaaaagaaaattaacaataccgccagaacttggatatggttcaagaggagcaggaaatgtgattcccgcgaatgcgactttgatatttgaagttgaattattaaaagtcaattaa

SEQ ID NO: 4489 - protein, 190 aa, Prochlorococcus marinus str. MIT 9215
MKEVFISFAVFVFCISLTLFSQFNSPQVVNAAESETQPVQKTPVAKSSNVSNNNLFELDPSDPNPILFAMAEETQSDSNSRTTESGLIIADIVNGEGDEANAGQTVTVNYTGILEDGTQFDTSIGRAPFSFPLGAGRVIKGWDEGVAGMKVGGKRKLTIPPELGYGSRGAGNVIPANATLIFEVELLKVN

SEQ ID NO: 4490 - DNA, 663 bp, Salmonella enterica subsp. arizonae serovar 62:z4,z23:--
  CDS (1)..(663): transl_table=11
atgctgcccgctacttttttgttatccgataaaggaaaaataatggccaccccgacttttgacactatcgaagcgcaagcgagctacggcattggtttgcaggtagggcagcaactcagcgaatccggtcttgaagggctgttgcctgaagcgctggttgcaggtattgctgatgcgctggaaggtaaacacccggcggttcctgttgatgtggtgcatcgtgcactgcgtgaaattcatgaacgtgcggacgcggtgcgtcgtgagcgtttcaaagcgatggcggccgaaggggtgaaatatctggaagaaaaccgcgaaaaagacggtgtgaacagcaccgaatccggtttgcagttccgcgttctgacgcagggcgaaggtgagattccggcgcgtaccgatcgcgtgcgcgtgcattataccggtaaacttattgatggcaccgtatttgacagctccgttgcgcgcggcgaaccggctgaattcccggtaaatggcgtgatcgccggctggattgaagcgctgactctgatgccggtaggttccaaatgggaactgacgatcccgcaggagctggcctatggcgagcgtggggccggggcatctattccgccattcagcaccctggtgtttgaggtggagctgctggaaattctctaa

SEQ ID NO: 4491 - protein, 220 aa, Salmonella enterica subsp. arizonae serovar 62:z4,z23:--
MLPATFLLSDKGKIMATPTFDTIEAQASYGIGLQVGQQLSESGLEGLLPEALVAGIADALEGKHPAVPVDVVHRALREIHERADAVRRERFKAMAAEGVKYLEENREKDGVNSTESGLQFRVLTQGEGEIPARTDRVRVHYTGKLIDGTVFDSSVARGEPAEFPVNGVIAGWIEALTLMPVGSKWELTIPQELAYGERGAGASIPPFSTLVFEVELLEIL

SEQ ID NO: 4492 - DNA, 525 bp, Synechococcus sp. PCC 7002
  CDS (1)..(525): transl_table=11
atgcgagaaatttggcttagttttggggtcatcgtgatctgtggggttatgttaatcttgtctgcggtctttaatggggccagccaaacggcgatcgccgctgaactcaactcaaccagtccagtggtacaaattgccgccaatcccaccgaggaactcaaaaatatggatattgatttatcgaaagcaacaacgaccgaatctggtcttcagtacatcgacgaagttgttggcgaaggagcgtcccccatggaaggggaaatggtgacggtacattacaccggcaaactcaccaatggcaaagtattcgatagctccgtcaagcgcaatgaacccttttcttttgtgatcggtgttgggcaagtgattaaaggttgggacgaaggtgtcattaccatgaagcctggtggtaagcgcacgctgattattcccgcggaactgggctatggttcccgtggtgctggtggtgtgatcccccccaatgccactttgatctttgatgtggaattgcttgggattcgctag

SEQ ID NO: 4493 - protein, 174 aa, Synechococcus sp. PCC 7002
MREIWLSFGVIVICGVMLILSAVFNGASQTAIAAELNSTSPVVQIAANPTEELKNMDIDLSKATTTESGLQYIDEVVGEGASPMEGEMVTVHYTGKLTNGKVFDSSVKRNEPFSFVIGVGQVIKGWDEGVITMKPGGKRTLIIPAELGYGSRGAGGVIPPNATLIFDVELLGIR

SEQ ID NO: 4494 - DNA, 567 bp, Cyanothece sp. ATCC 51142
  CDS (1)..(567): transl_table=11
atggcgttaaagacagttagtaaaggaaaaaaacgatcaatgcgtgaaattttgattagtttcgggattattgctgcttttagtttattgttactatttagttttatttttggtaactctgacaaaaaaacggcgatcgcctcggaaaatacccccgatatcacccaagatacgttaatggctttgaatattaataataaggaaattaccgatatggatctagaaaacgccgttaccactgagtctggactcaaatatattgatcttaaagaaggggatggggaaagtccagaaacgggacaaatggtgaccgtacactacactggaaccctagaaaatggcaaaaagtttgatagttcccgcgatcgcggtaaacccttttcttttaaaattggtgttggacaagtgatcaaaggatgggatgaaggagtcgcatcaatgaaagttggtggccaacgaatcttagtgattcctcctgacttgggttatggtgcaaggggtgccggtggtgttattcctcctaatgcaactttaatttttgatgtggaattattaggggttaaatag

SEQ ID NO: 4495 - protein, 188 aa, Cyanothece sp. ATCC 51142
MALKTVSKGKKRSMREILISFGIIAAFSLLLLFSFIFGNSDKKTAIASENTPDITQDTLMALNINNKEITDMDLENAVTTESGLKYIDLKEGDGESPETGQMVTVHYTGTLENGKKFDSSRDRGKPFSFKIGVGQVIKGWDEGVASMKVGGQRILVIPPDLGYGARGAGGVIPPNATLIFDVELLGVK

SEQ ID NO: 4496 - DNA, 375 bp, Mycobacterium marinum M
  CDS (1)..(375): transl_table=11
atgactgcaaagaagcctgagatcgactttcccggcggggagccgcccaccgacctggtcatcaccgacgtcgtagagggcgacggtgcggaggccacctccggcaagaccgtggtcgtgcactacgtcggggtggcccactccaccggcgaggagttcgacgcttcctacaaccgcggtgacccgttgatgttcaaactcggcgtcggccaggtcatccagggttgggaccaaggcgtgcagggcatgaaggtcggcggccgccgacagctgcatatccccgcccacctcgcttacggcgaccgtggcgccggtggcgtcatcaagcccggcgagtcgctgatcttcgtggtggacctgctcgatgtcagatag

SEQ ID NO: 4497 - protein, 124 aa, Mycobacterium marinum M
MTAKKPEIDFPGGEPPTDLVITDVVEGDGAEATSGKTVVVHYVGVAHSTGEEFDASYNRGDPLMFKLGVGQVIQGWDQGVQGMKVGGRRQLHIPAHLAYGDRGAGGVIKPGESLIFVVDLLDVR

SEQ ID NO: 4498 - DNA, 492 bp, Nostoc punctiforme PCC 73102 (Nostoc punctiforme ATCC 29133)
  CDS (1)..(492): transl_table=11
atgctggtgtgtgttgtgcttttggctgtggggcaagtaggcagtaaacagaatactgccattgctgcccagttaacccaaacgccgccagcggccacaactgtaactgaaaacaatatcttaattgcgagtaatactatgtctgacgctaatgccgtaactactccgtctggattgaagtatgtggagttaaaagaggggactggggcaactcctcaaccaggacaaacggttgaagttcactatgtcggcactctagaagatggtactaagtttgatagttcacgcgatcgcggccaacccttcagctttaaaattggtgtaggacaggtaatcaaaggttgggacgagggagttagcacgattaaagtaggcggtcgtcgtaagttaatcatcccatctgagttaggctatggcgctcgtggtgctggtggcgtgattccacccaatgcaactctaatttttgatgtggaattgctaggagttaaataa

SEQ ID NO: 4499 - protein, 163 aa, Nostoc punctiforme PCC 73102 (Nostoc punctiforme ATCC 29133)
MLVCVVLLAVGQVGSKQNTAIAAQLTQTPPAATTVTENNILIASNTMSDANAVTTPSGLKYVELKEGTGATPQPGQTVEVHYVGTLEDGTKFDSSRDRGQPFSFKIGVGQVIKGWDEGVSTIKVGGRRKLIIPSELGYGARGAGGVIPPNATLIFDVELLGVK

SEQ ID NO: 4500 - DNA, 486 bp, Xanthomonas campestris pv. campestris str. B100
  CDS (1)..(486): transl_table=11
atgatagcgggagccaggtgcgataatgcgcgcctcactcctgtggatcacgccatgcgcctctttttgacgctttgcgccgccctgttgctggcgagctgcgcccctgccctgcccccgtccggtggcaccatcgccgcgttcgagcggatcgatcgcaccgtcggcactggcaccgaagccacgcccaatgcgttggtcaccgtgcactacaccggctggctatacgacgagaaggcggccgacaaacacggcaagaagttcgacagctcactggatcgcgccgagccgttccagttcgtgctgggtggccgccaggtcatccgcggctgggatgagggtgtggccggcatgcgcgtcggcggcaagcggaccttgatgatcccgccggagttcggttacggcgacaaaggtgccggtggggtcattccgccgggcgcctcgctggtgttcgacgtcgaactgcttggcgtgcagccgcgctga

SEQ ID NO: 4501 - protein, 161 aa, Xanthomonas campestris pv. campestris str. B100
MIAGARCDNARLTPVDHAMRLFLTLCAALLLASCAPALPPSGGTIAAFERIDRTVGTGTEATPNALVTVHYTGWLYDEKAADKHGKKFDSSLDRAEPFQFVLGGRQVIRGWDEGVAGMRVGGKRTLMIPPEFGYGDKGAGGVIPPGASLVFDVELLGVQPR

SEQ ID NO: 4502 - DNA, 408 bp, Bifidobacterium longum DJO10A
  CDS (1)..(408): transl_table=11
atgacagatcagatgcctcaggtgaacgccgaattcggcaccacgcccgttatcgagttcccgacgcccgaagccccgaagggcctcaaggttgtggagctgaccgagggagacggcccgatcgtgcgtcgcggcgacaccgtcaccgtgaactaccacggcgtggtgtggggtaaggacaccccattcgactccagcttcgaccgtcatcagcccgccagcttcggcatcggcgtgggacaggtcatcaagggctgggaccagactgtgccgggccataacgtgggttcgcgtctggtggtttccattccgccggaatacggttacggttcccgcggcatcccgcaggccggcatcggcggcgaggacacgctggtgttcgtcatcgacatcatttccacccgctga

SEQ ID NO: 4503 - protein, 135 aa, Bifidobacterium longum DJO10A
MTDQMPQVNAEFGTTPVIEFPTPEAPKGLKVVELTEGDGPIVRRGDTVTVNYHGVVWGKDTPFDSSFDRHQPASFGIGVGQVIKGWDQTVPGHNVGSRLVVSIPPEYGYGSRGIPQAGIGGEDTLVFVIDIISTR

SEQ ID NO: 4504 - DNA, 348 bp, Cupriavidus taiwanensis
  CDS (1)..(348): transl_table=11
atgcaaactacgccctctggcctgcaatacgaagacaccaccgtcggcgcaggcgccgaagccaccgccggcaagcacgtcaccgtgcactacaccggctggctgtacgaaaacggccaggccggccgcaagttcgattcgagcaaggaccgcaacgaccccttcgtgttcccgctgggtgccggccatgtgatccgcggctgggacgaaggcgtgcagggcatgaaggtgggcggcgtgcgccgcctggtgatccccgccgacctgggctacggtgcgcgcggcgccggcggcgtgatcccgccgaacgcgacgctgctgtttgaagtggaactgctggcggtctaa

SEQ ID NO: 4505 - protein, 115 aa, Cupriavidus taiwanensis
MQTTPSGLQYEDTTVGAGAEATAGKHVTVHYTGWLYENGQAGRKFDSSKDRNDPFVFPLGAGHVIRGWDEGVQGMKVGGVRRLVIPADLGYGARGAGGVIPPNATLLFEVELLAV

SEQ ID NO: 4506 - DNA, 438 bp, Cupriavidus taiwanensis
  CDS (1)..(438): transl_table=11
atgaaaacaatcgcgcttttccttggcaccctgacccttgccggcgccgcatgcgccgccgggccggccgcttcggcgcccgctgcctctgccgcggcggcaccgcagacgctggcgtcgggcatgaccatccagcacctgatcaagggcaccggtgcctcgcccaaggccaccgacacggtgcaggtgcactaccgcggcacgctcgcggacggcaccgaattcgacagctcgtacaagcgcggccagccgatctcgtttccgctcaaccgtgtgatcccgtgctggaccgagggcgtgcaggccatgcaggtgggcggcaaggcccgcctgacctgccctccgggcaccgcctacggcgcgcgcggcgtgccgggcacgatcccgccgaacgccacgctgacgttcgaggtggtgctgctgggcatcggcggttaa

SEQ ID NO: 4507 - protein, 145 aa, Cupriavidus taiwanensis
MKTIALFLGTLTLAGAACAAGPAASAPAASAAAAPQTLASGMTIQHLIKGTGASPKATDTVQVHYRGTLADGTEFDSSYKRGQPISFPLNRVIPCWTEGVQAMQVGGKARLTCPPGTAYGARGVPGTIPPNATLTFEVVLLGIGG

SEQ ID NO: 4508 - DNA, 342 bp, Burkholderia cenocepacia J2315
  CDS (1)..(342): transl_table=11
atgtccgtcatcacgaccgaatcgggcctcaagtacgaagacctgaccgaaggcaccggcgcggcagcgcaagccggcaagaccgtcagcgtccactacacgggctggctgaccgacggtcagaaattcgattcgagcaaggatcgcaacgacccgttcgcgttcgtgctcggcggcggcatggtcatcaagggctgggacgaaggcgtgcagggcatgaaggtcggcggcgtgcgtcgcctgacgatcccgccgcaactcggctacggcccgcgcggcgcaggcggcgtgattccgccgaatgcaacgctcgtgttcgaagtcgaactgctcgacgtctga

SEQ ID NO: 4509 - protein, 113 aa, Burkholderia cenocepacia J2315
MSVITTESGLKYEDLTEGTGAAAQAGKTVSVHYTGWLTDGQKFDSSKDRNDPFAFVLGGGMVIKGWDEGVQGMKVGGVRRLTIPPQLGYGPRGAGGVIPPNATLVFEVELLDV

SEQ ID NO: 4510 - DNA, 336 bp, Acinetobacter sp. ADP1
  CDS (1)..(336): transl_table=11
atgcaagaattacagattattgatttaaaagtaggtgaaggtaaagaagcggtaaaaggtgctttaattacaacgcactacacaggatggctcgaagatggcactaaatttgatgcttctatagatcgcggtaattactttgaatgtgtaattggtactggacgagtcattaaaggctgggatcagggtattataggtatgaaagtaggcggaaaacgtaagttgatcgtgcctgcacatctggcttacggtgagcgcaagatgggaaacatcattcctgcaaattctaatttgatttttgaaattgaattatttgatgtaaaaacccgtgattaa

SEQ ID NO: 4511 - protein, 111 aa, Acinetobacter sp. ADP1
MQELQIIDLKVGEGKEAVKGALITTHYTGWLEDGTKFDASIDRGNYFECVIGTGRVIKGWDQGIIGMKVGGKRKLIVPAHLAYGERKMGNIIPANSNLIFEIELFDVKTRD

SEQ ID NO: 4512 - DNA, 621 bp, Pectobacterium atrosepticum SCRI1043
  CDS (1)..(621): transl_table=11
atgacaactccttcttttgatagcgtcgaggcgcaggcaagttacggcatcggcttacaggttggtcaacagttacaggaatcaggtcttgaaggcctgatcccagaagctctgcttgctggtctacgtgatgcgctggaaggtaatgcgccagcggtgcctgtggatgtggttcatcgtgcgctgcgcgaaattcatgagcgtgctgatgcggtgcgtcgcgatcgtcagcaagagctggcggtagaaggccagcaattcctggctgaaaacgcgcagaaagaaggcgtggatagcacggagtctggtctgcaattccgcgtgttgacacagggtgaaggtgcgattcctgctcgtcaggatcgtgtacgtgtgcattacactggtcgtttaactgacggcagtgtgttcgatagctccgttgagcgtggtcaacctgctgaattcccagtaagcggcgtgattccaggctggattgaggcgttgacgctgatgccagtcggttccaagtgggaactctatattccacataatctggcgtatggtgaacgtggcgcgggtgcttccattccgccgttcagcgccctgatttttgaagtggaactgctggaaattctgtaa

SEQ ID NO: 4513 - protein, 206 aa, Pectobacterium atrosepticum SCRI1043
MTTPSFDSVEAQASYGIGLQVGQQLQESGLEGLIPEALLAGLRDALEGNAPAVPVDVVHRALREIHERADAVRRDRQQELAVEGQQFLAENAQKEGVDSTESGLQFRVLTQGEGAIPARQDRVRVHYTGRLTDGSVFDSSVERGQPAEFPVSGVIPGWIEALTLMPVGSKWELYIPHNLAYGERGAGASIPPFSALIFEVELLEIL

SEQ ID NO: 4514 - DNA, 366 bp, Propionibacterium acnes KPA171202
  CDS (1)..(366): transl_table=11
atgagcaagcccgaagtgaccctgcccgattccgcccccgacgacctcgtcgttgaggacatcaccatcggcgacggccctgaagcgtccgctggcaacctcgtcgaagtgcactacgtcggcgtggccttaagcaatggtcgtgagttcgattcttcctggaaccgcggtgagccgctgaccttccaactaggggctggccaggtgatccccgggtgggatgaaggtgtccaaggtatgaaggtcggtggacgacgcaaactcgtcatcccccaccaccttgcttacggtccgcaaggaatctccggtgtgatcgctggcggtgagacgctggtcttcgtctgcgaccttgtcaacgtcatctga

SEQ ID NO: 4515 - protein, 121 aa, Propionibacterium acnes KPA171202
MSKPEVTLPDSAPDDLVVEDITIGDGPEASAGNLVEVHYVGVALSNGREFDSSWNRGEPLTFQLGAGQVIPGWDEGVQGMKVGGRRKLVIPHHLAYGPQGISGVIAGGETLVFVCDLVNVI

SEQ ID NO: 4516 - DNA, 345 bp, Aromatoleum aromaticum EbN1
  CDS (1)..(345): transl_table=11
atgtcccagaccacgaccgccagcggcctcatcatcgaagacatggaggtcggcaacggcgcgacggccgagaaaggcaagagcgtatcggtgcattacactggctggctcaccgacggccgcaagttcgattcgagcaaggatcgtaacgatccgttcgagtttccgctcggcgccggccacgtcatccgcggctgggacgaaggcgtgcagggcatgcaggaaggcggccggcgcaagctgacgatcccgcccgagctcggctacggcgcgcgcggcgccggtggcgtgatcccgccgaacgcgacgctggtgttcgaagtggagctgctgaaagtccgctga

SEQ ID NO: 4517 - protein, 114 aa, Aromatoleum aromaticum EbN1
MSQTTTASGLIIEDMEVGNGATAEKGKSVSVHYTGWLTDGRKFDSSKDRNDPFEFPLGAGHVIRGWDEGVQGMQEGGRRKLTIPPELGYGARGAGGVIPPNATLVFEVELLKVR

SEQ ID NO: 4518 - DNA, 525 bp, Synechococcus elongatus PCC 6301
  CDS (1)..(525): transl_table=11
gtgcgtgacattctgatcagttttgcagccatgctgctctgcctgatcgtctttgtcgcggctcaggtgtttggaccgacaacacccgctgcgatcgctgcacccagtgctgtcgaggcatctcctccggttgcggctgttccgccaaccccgatcatttcccagaccactcaatcggaaactattgtgacgacagcttctggcctgcagtatgtggatttggaagtcggcaccggagctacgccccaaccgggtcaaaccgtggtggttcactacacaggcaccctcgaggatggcacccagttcgacagctctcgcgatcgcaaccggcctttccagttcaagctaggtgttggccaagtgatcaaaggctgggatgaaggcattgccaccatgaaagtgggcggtcgccgcaagctgacgattccgccgactttggcctacggtgagcgcggtgctggtggcgtcattccccccaatgccacgctgatctttgatgttgaactgattcgcattgcaggctag

SEQ ID NO: 4519 - protein, 174 aa, Synechococcus elongatus PCC 6301
MRDILISFAAMLLCLIVFVAAQVFGPTTPAAIAAPSAVEASPPVAAVPPTPIISQTTQSETIVTTASGLQYVDLEVGTGATPQPGQTVVVHYTGTLEDGTQFDSSRDRNRPFQFKLGVGQVIKGWDEGIATMKVGGRRKLTIPPTLAYGERGAGGVIPPNATLIFDVELIRIAG

SEQ ID NO: 4520 - DNA, 375 bp, Pseudomonas syringae pv. syringae B728a
  CDS (1)..(375): transl_table=11
atgacagagcgcgcagcaaccggaagcatcgcaatgagcaaagaattacagattactgatctgcacctcggcgagggcaaggcagcggtaaagggtgcgctgatcaccacgcattacaccggaacccttgaggacgggactgtgttcgattcctcccacgagcgtggcaagccatttcagtgtgtgatcggcaccggtcgcgtcatcaagggctgggaccagggcctgatgggcatgaaagtcggcggcaagcgtcaattgttcgtccctgcccacctggcctacggcgacagaagcatgggcgcgcacatcaagcccggtgccgacctgacgttcgaaatagaactgctggaagtgctgacccgcgacgattga

SEQ ID NO: 4521 - protein, 124 aa, Pseudomonas syringae pv. syringae B728a
MTERAATGSIAMSKELQITDLHLGEGKAAVKGALITTHYTGTLEDGTVFDSSHERGKPFQCVIGTGRVIKGWDQGLMGMKVGGKRQLFVPAHLAYGDRSMGAHIKPGADLTFEIELLEVLTRDD

SEQ ID NO: 4522 - DNA, 339 bp, Pseudomonas fluorescens Pf-5
  CDS (1)..(339): transl_table=11
atgagcgacgaattgcaggtcatcgatatccagccgggcgacggcaaggctgtggtcaagggcgccttgatcaccacccagtaccggggctttctggaggacggcagcagcttcgactcctcctatgatcgtggcaagccgttccagtgcgtgatcggcaccggccgggtgatcaagggctgggaccagggcctgatgggcatgcaggtgggcggcaagcgcaagctgctggtgccggcgcacctgggttatggcgagcgttccatgggcgccatcccgcccaattccaacctgatcttcgagatcgagttgctggaagtgctgacccgggacgattga

SEQ ID NO: 4523 - protein, 112 aa, Pseudomonas fluorescens Pf-5
MSDELQVIDIQPGDGKAVVKGALITTQYRGFLEDGSSFDSSYDRGKPFQCVIGTGRVIKGWDQGLMGMQVGGKRKLLVPAHLGYGERSMGAIPPNSNLIFEIELLEVLTRDD

SEQ ID NO: 4524 - DNA, 474 bp, Colwellia psychrerythraea 34H
  CDS (1)..(474): transl_table=11
atgagtaaatttatattattagcgattgttattgctattgttgtgttcagcttgatgcgatcaaataacaacaaaaaagcggcccagttaaatgcaactttaggcagtgattttcttgtgtctaataagagtgaagaaggggtattagaaacagcttctggcttgcaatacaaagtgctaactgaaggcagtggcactgagcacccaagtgcttcttcaaaagttacagtgcattatcacgggactttactcaatggaaaagtatttgatagctcggtagatagaggtgagccaattggctttggtttacagcaagtcatcaaaggttggactgaaggtgttcagttgatggttgttggtgaaaaaacacgtttttatattccatcaaatttagcttatggcgatagtgcggcaggaaaaatagcgccaggttcattattaatttttgatgttgaattgttagcgataaactaa

SEQ ID NO: 4525 - protein, 157 aa, Colwellia psychrerythraea 34H
MSKFILLAIVIAIVVFSLMRSNNNKKAAQLNATLGSDFLVSNKSEEGVLETASGLQYKVLTEGSGTEHPSASSKVTVHYHGTLLNGKVFDSSVDRGEPIGFGLQQVIKGWTEGVQLMVVGEKTRFYIPSNLAYGDSAAGKIAPGSLLIFDVELLAIN

SEQ ID NO: 4526 - DNA, 420 bp, Pseudomonas syringae pv. phaseolicola 1448A
  CDS (1)..(420): transl_table=11
gtgcttttctgcgagaaagcgctgcgaaaatgcacgctctcggcattcattgagcgcgctaaaaacggaagccttgtaatgagcaaagaattacagattaccgacctgcatcccggcgaaggcaaggaagcggtcaaaggtgcgctgatcaccacgcattacaccggaaccctcgaagacggcactgtctttgattcctctcaccagcgtggcaagccgtttcagtgcgtgatcggcactggacgcgttatcaagggctgggatcagggccttatgggcatgaaggtgggcggcaaacgcaaactgttcgtgcctgcccacctggcctatggcgacagaacgatgggcgcgcacatcaaaccgggtgccgacctgacgtttgaaatagagctgctggaagtgctgacccgcgacgattga

SEQ ID NO: 4527 - protein, 139 aa, Pseudomonas syringae pv. phaseolicola 1448A
MLFCEKALRKCTLSAFIERAKNGSLVMSKELQITDLHPGEGKEAVKGALITTHYTGTLEDGTVFDSSHQRGKPFQCVIGTGRVIKGWDQGLMGMKVGGKRKLFVPAHLAYGDRTMGAHIKPGADLTFEIELLEVLTRDD

SEQ ID NO: 4528 - DNA, 345 bp, Dechloromonas aromatica RCB
  CDS (1)..(345): transl_table=11
atggctgaaatcacgactgcctccgggctggtttatgaagataccgtcgtcggcgaaggcgccgaggccaaggcgggcaattttgtgacggtccattacaccggatggctgaccaacggcagcaagtttgattcgagcaaggatcgtaacgatccgttcgaattcccgctcggccagcgccatgtgatcgccggttgggatgagggcgttcagggcatgaaggtcggtggcacgcgtaagctgaccatcccggcccagctgggttacggtgcacggggtgctggtggtgtcattccgccgaacgcgacgctggttttcgaggttgatctgcttggcgtgcaatga

SEQ ID NO: 4529 - protein, 114 aa, Dechloromonas aromatica RCB
MAEITTASGLVYEDTVVGEGAEAKAGNFVTVHYTGWLTNGSKFDSSKDRNDPFEFPLGQRHVIAGWDEGVQGMKVGGTRKLTIPAQLGYGARGAGGVIPPNATLVFEVDLLGVQ

SEQ ID NO: 4530 - DNA, 327 bp, Thiobacillus denitrificans ATCC 25259
  CDS (1)..(327): transl_table=11
atgagcgaactcgtcatcgaagatctcgtcgtcggcaacggcgacaccgcgacccccggccaattcgtctcggtgcactacaccggctggctcaccaacggccagaagttcgactccagcgtcgaccgcggcgacccgttcgaattcaagctcggtgccggccaggtcatcgccggctgggaccagggcgtcgccggcatgcagatcggcggcaagcgcaagctcacgatcccgccgaacctcggctacggcgcgcgcggcgcaggcggcgtgatcccgccgaacgcgacgctcgtgttcgaggtcgagctgctcggcgtgaactga

SEQ ID NO: 4531 - protein, 108 aa, Thiobacillus denitrificans ATCC 25259
MSELVIEDLVVGNGDTATPGQFVSVHYTGWLTNGQKFDSSVDRGDPFEFKLGAGQVIAGWDQGVAGMQIGGKRKLTIPPNLGYGARGAGGVIPPNATLVFEVELLGVN

SEQ ID NO: 4532 - DNA, 498 bp, Anabaena variabilis ATCC 29413 (Anabaena flos-aquae UTEX 1444)
  CDS (1)..(498): transl_table=11
atgctggtttgtgttgtggttttggtgttggcacaagtagggaataaacaggactctgctattgctgctaatttaccgcaaactccactagccaccattagcgttactgaaaacaatactccaatcaagagcaatattatgtctgatgcctctaagccgactgtcactaccgattctggtctcaaatatgtggaaatagaagagggaactggcgcgactcccaaaagtggacaaaccgtcgtagttcactacactggtactttagaagatggtaccaagtttgatagctcacgcgatcgcaatcgtcccttcagctttaccatcggtgttggacaagtcattaaaggttgggatgaaggacttagcaccatgaaagtaggtggtcgtcgtcaattaatcatcccctcagaattgggttatggcgctcgtggtgctggtggggtgattccaccttactcaaccctactatttgatgtggaattgttggaagtgaagtag

SEQ ID NO: 4533 - protein, 165 aa, Anabaena variabilis ATCC 29413 (Anabaena flos-aquae UTEX 1444)
MLVCVVVLVLAQVGNKQDSAIAANLPQTPLATISVTENNTPIKSNIMSDASKPTVTTDSGLKYVEIEEGTGATPKSGQTVVVHYTGTLEDGTKFDSSRDRNRPFSFTIGVGQVIKGWDEGLSTMKVGGRRQLIIPSELGYGARGAGGVIPPYSTLLFDVELLEVK

SEQ ID NO: 4534 - DNA, 342 bp, Burkholderia sp. 383
  CDS (1)..(342): transl_table=11
atgtctgtcatcacgaccgaatcgggcctcaaatacgaagacctgaccgaaggcaccggcgacgtagcgcaagccggccagaccgtcagcgtccactacacgggctggctgaccgacggtcagaaattcgactcgagcaaggatcgcaacgacccgttcgcgttcgtgctcggcggcggcatggtcatcaagggctgggacgaaggcgtgcagggcatgaaggtcggcggcgtgcgtcgcctgacgatcccgccgcaactcggctacggcccgcgcggcgcaggcggcgtgattccgccgaatgccacgctcgtgttcgaagtcgaactgctcgacatctga

SEQ ID NO: 4535 - protein, 113 aa, Burkholderia sp. 383
MSVITTESGLKYEDLTEGTGDVAQAGQTVSVHYTGWLTDGQKFDSSKDRNDPFAFVLGGGMVIKGWDEGVQGMKVGGVRRLTIPPQLGYGPRGAGGVIPPNATLVFEVELLDI

SEQ ID NO: 4536 - DNA, 573 bp, Prochlorococcus marinus str. MIT 9312
  CDS (1)..(573): transl_table=11
gtgaaagaagtctttattagttttgcggtttttgttttttgtgtttcattaactcttttcagtcaatttaattcaccacaagttgttaatgctgccgaatcagaaactcagttaattcaaaaaacacctgttgcaaaatcatcaaatgtttcaaataataatttatttgagctagacccatcagatccaaatcctatacttttcgctatggcagaagaaacacaatcagaaagcaattcaaggactacagaaagtggtctaattatttcggatatcgtaaatggagaaggagatgaagctagtgctgggcaaacagttacagtaaattatacaggaactttagaagacgggacaaaatttgataccagtatcggtagagctccattcagctttcccttaggtgctggacgagtaataaaaggttgggacgaaggtgtcgtaggcatgaaagttggaggcaaaagaaaattaacaatacctccggaacttggatatggatcaagaggggcaggaaatgttatacccgccaatgcaactttgatatttgaagttgaattattaaaagtcaattaa

SEQ ID NO: 4537 - protein, 190 aa, Prochlorococcus marinus str. MIT 9312
MKEVFISFAVFVFCVSLTLFSQFNSPQVVNAAESETQLIQKTPVAKSSNVSNNNLFELDPSDPNPILFAMAEETQSESNSRTTESGLIISDIVNGEGDEASAGQTVTVNYTGTLEDGTKFDTSIGRAPFSFPLGAGRVIKGWDEGVVGMKVGGKRKLTIPPELGYGSRGAGNVIPANATLIFEVELLKVN

SEQ ID NO: 4538 - DNA, 342 bp, Burkholderia thailandensis E264
  CDS (1)..(342): transl_table=11
atggcagtcgtcaccaccgaatcgggcctcaaatacgaagacctgaccgaaggcacgggcgccgaggcgcgcgcgggccagacggtgagcgtgcactacacgggctggctcaccgacggccagaagttcgattcaagcaaggatcgcaacgatccgttcgcgttcgtgctcggcggcggcatggtcatcaagggctgggacgaaggcgtgcaagggatgaaggtgggcggcgtgcgccgtctgacgatcccgccgcaactcggctacggcgcgcgcggcgcgggcggcgtgattccgcccaacgcgacgctcgtgttcgaagtcgaactgctcgacgtctga

SEQ ID NO: 4539 - protein, 113 aa, Burkholderia thailandensis E264
MAVVTTESGLKYEDLTEGTGAEARAGQTVSVHYTGWLTDGQKFDSSKDRNDPFAFVLGGGMVIKGWDEGVQGMKVGGVRRLTIPPQLGYGARGAGGVIPPNATLVFEVELLDV

SEQ ID NO: 4540 - DNA, 564 bp, Novosphingobium aromaticivorans DSM 12444
  CDS (1)..(564): transl_table=11
atgtcggaaatcacccgcgttccgctccagcccatcgccaagggctccatcggcaagatctggctcggcgtgatcgtcgccgtgctcatcggctcgggcgttgcctatggcacccgctacaagggcgtcgtggttgaaacggtgaaggccggcgctggcgcctcgccgacgaagagcgacgtcgcgctcatcaactatgtcggccgcctcgccaacggcaaggaattcgaccgcggagagcgtgcggtcctgccgctcgaaaccgtgatcccgggtttcaccgaaggcctcgccaagatgcagaagggcggcaagtacgtcctcgagatcccggccgaaaaggcctacggcgccgaggaaaagcgcaacccgcagaccggagaggtggtcatccccgccaactccgacctcgtgttcgagatcgaactgatcgacttcaagagcgccgccgagcttgagcagcagcgcatgatgctcgaacagatgcagaagatgcagggcggcgccggcgcggctcccggcggggcgcccatgccgatgccgcagggcgctccgcaaccctga

SEQ ID NO: 4541 - protein, 187 aa, Novosphingobium aromaticivorans DSM 12444
MSEITRVPLQPIAKGSIGKIWLGVIVAVLIGSGVAYGTRYKGVVVETVKAGAGASPTKSDVALINYVGRLANGKEFDRGERAVLPLETVIPGFTEGLAKMQKGGKYVLEIPAEKAYGAEEKRNPQTGEVVIPANSDLVFEIELIDFKSAAELEQQRMMLEQMQKMQGGAGAAPGGAPMPMPQGAPQP

SEQ ID NO: 4542 - DNA, 624 bp, Saccharophagus degradans 2-40
  CDS (1)..(624): transl_table=11
atgtcggataaccaatacaccaccgttgaacaacgtgtaagctacggcatcggccgtcaaatgggcgaccaacttgccagcaaccctttcgaaggcgttgaaccatctgccgttgcacagggtgtaatagacgcgcttgagggcaaagaaagcccagtaagcccagaagatttaaacgaagctttccgcgttatccgcgaaaaacttgaagccgaagaaaaagagcgcgcaaaaacaatgggcgctgaaggcgaagcctttttagctgagaacgccaaaaaagaaggcgtaactgttaccgaatctggcttgcagtacgaaattttaaccgaaggcactggcgaaaaaccaaaagccacttcaaccgttaaaactcactaccacggcaccttaattgacggcactgtgtttgacagctctgtagagcgcggccaaccagcagaattccccgttaacggtgtaatcgcaggctggaccgaagccctacaattgatgccagtaggctctaaatggcgcttatctatcccttaccagctagcctacggcgagcgcggtgctggcggcgcaattaagcctttcgcagcacttgtgttcgacgttgaattgttggaaattgttgcctaa

SEQ ID NO: 4543 - protein, 207 aa, Saccharophagus degradans 2-40
MSDNQYTTVEQRVSYGIGRQMGDQLASNPFEGVEPSAVAQGVIDALEGKESPVSPEDLNEAFRVIREKLEAEEKERAKTMGAEGEAFLAENAKKEGVTVTESGLQYEILTEGTGEKPKATSTVKTHYHGTLIDGTVFDSSVERGQPAEFPVNGVIAGWTEALQLMPVGSKWRLSIPYQLAYGERGAGGAIKPFAALVFDVELLEIVA

SEQ ID NO: 4544 - DNA, 459 bp, Methylobacillus flagellatus KT
  CDS (1)..(459): transl_table=11
atgaaaccaattgccatgctggcaagcgcgttcgtgctggccatgctcgccatgagtggctgttcagccgataccaatagtgacaaggaaaaaatcgtaatgagcgacaacatcaccgaattacagaaaatcgataccctggtgggggaaggccgtgaagccgaagccggcttgaatgtgactgtgcactataccggctggctgtatgaccccagcaagcctgatggcaagggcaccaagttcgacagttctgtggaccgccgtgaaccgttcgtgttctatctgggcggcgggcaggtgatccgtggctgggacgaaggatttgcgggcatgaaggtgggcggcaagcgcaccctcgtcattccgccggagtatggctatggtgcacgcggcgcaggtggcgtgatcccacctaacgccaccttgctgttcgatgtggagctgcttggagtaaagtaa

SEQ ID NO: 4545 - protein, 152 aa, Methylobacillus flagellatus KT
MKPIAMLASAFVLAMLAMSGCSADTNSDKEKIVMSDNITELQKIDTLVGEGREAEAGLNVTVHYTGWLYDPSKPDGKGTKFDSSVDRREPFVFYLGGGQVIRGWDEGFAGMKVGGKRTLVIPPEYGYGARGAGGVIPPNATLLFDVELLGVK

SEQ ID NO: 4546 - DNA, 339 bp, Burkholderia xenovorans LB400
  CDS (1)..(339): transl_table=11
atgtctgtgactaccgaatccggtttgaagtacgaagacatcgttgaaggcaccggcgccgaggcagtggccggcaagaccgtcagcgtccactacaccggctggctgaccgatggccagaagttcgactccagcaaggaccgcaatgacccgttcgctttcgtgctgggcggcggcatggtcatcaagggctgggacgaaggcgtgcaaggcatgaaggttggaggcacccgcaaactgaccatcccgccgcaactcggctacggcgtgcgcggcgcgggcggcgtgattccgcccaatgcgacgctcgtgttcgaagtcgaattgctcggcgtctga

SEQ ID NO: 4547 - protein, 112 aa, Burkholderia xenovorans LB400
MSVTTESGLKYEDIVEGTGAEAVAGKTVSVHYTGWLTDGQKFDSSKDRNDPFAFVLGGGMVIKGWDEGVQGMKVGGTRKLTIPPQLGYGVRGAGGVIPPNATLVFEVELLGV

SEQ ID NO: 4548 - DNA, 348 bp, Ralstonia metallidurans CH34
  CDS (1)..(348): transl_table=11
atgcaaaccactccctccggcctgcaattcgaagacaccgtcgtcggttcgggcgacgaagccaaggcaggcaagcatgtgaccgtgcactacaccggctggctcttcgagaacggccaggctggccgcaagttcgattcgagcaaggatcgtaacgacccgttcgtgttcccgctgggcgccggccacgtcattcgcggttgggacgaaggcgtgcaaggcatgaaggttggtggcacacgccgcctggtcattcccgccgacctgggctacggtgcccgtggcgccggtggtgtgattcctccgaacgccacgctgctgttcgaagtggaactgctcgcggtctga

SEQ ID NO: 4549 - protein, 115 aa, Ralstonia metallidurans CH34
MQTTPSGLQFEDTVVGSGDEAKAGKHVTVHYTGWLFENGQAGRKFDSSKDRNDPFVFPLGAGHVIRGWDEGVQGMKVGGTRRLVIPADLGYGARGAGGVIPPNATLLFEVELLAV

SEQ ID NO: 4550 - DNA, 324 bp, Myxococcus xanthus DK 1622
  CDS (1)..(324): transl_table=11
atgggtttgaatgtggaagacgtgaaggtgggcaccggcacggaggcaacggccggcaagtccgttaccgtgcactacgtggggacgctgaccagcggctccaagttcgatagcagccgggaccggggccagggcttcacgttccgcctgggcgccgggcaggtcatcgagggttgggacaagggcgtggccggtatgaaggtgggcggcgtgcgcaagctcaccatcccgccggagatgggatatggcgcgcgagggttcccgcccgttattccccccaactccaccctgctgttcgaggtggagctcctggacgttcgttga

SEQ ID NO: 4551 - protein, 107 aa, Myxococcus xanthus DK 1622
MGLNVEDVKVGTGTEATAGKSVTVHYVGTLTSGSKFDSSRDRGQGFTFRLGAGQVIEGWDKGVAGMKVGGVRKLTIPPEMGYGARGFPPVIPPNSTLLFEVELLDVR

SEQ ID NO: 4552 - DNA, 612 bp, Trichodesmium erythraeum IMS101
  CDS (1)..(612): transl_table=11
ttggagaccaaacccttacagttttttttgcgagttaaattaggaggattaattttgcgcggaattattattagtttgggaatagcaatagtctgtggtttggttttgattatttctcaaattataggttcgggaaaagatgtggttgcttctcaaaatacaccagatactataggttctactgaaattcaggagcaagtggcagaaggtactatactaaatccaacaattacaatggcagaaaatattatggctcaagatgatgaaaaagttactactactgattctggtcttcagtatgtggacgtggtagaaggagatggtgctactcctcaaaggggtcagacagttgtggttcactatactggaactttagaggatggttctaagtttgatagttctcgcgatcgcaatcaacctttccaatttaaagttggggtaggtcaagttattaagggttgggatgaaggagtaggtagtatgaaagttggtggacgtcgaaagttgattataccatcggatttagggtatggttcccgtggtgctggtggagtcatacctcctaatgctactcttatttttgatgtagaattattgagaattgctaattga

SEQ ID NO: 4553 - protein, 203 aa, Trichodesmium erythraeum IMS101
METKPLQFFLRVKLGGLILRGIIISLGIAIVCGLVLIISQIIGSGKDVVASQNTPDTIGSTEIQEQVAEGTILNPTITMAENIMAQDDEKVTTTDSGLQYVDVVEGDGATPQRGQTVVVHYTGTLEDGSKFDSSRDRNQPFQFKVGVGQVIKGWDEGVGSMKVGGRRKLIIPSDLGYGSRGAGGVIPPNATLIFDVELLRIAN

SEQ ID NO: 4554 - DNA, 336 bp, Shewanella sp. MR-4
  CDS (1)..(336): transl_table=11
atgactgaattagaagttgtcgatctggttatcggcgaaggaaaagaggccgtaaaaggcgcgttgatcaccactcaataccgcggttttttgcaggatggcactcagtttgattcctcctatgaccgtggtcaggcatttcaatgcgtgattggcactggccgagtgattaaaggttgggatcaaggactgatgggcatgaaggttggcggaaaacgtaagttattcgtccctgcgcatttagcctacggcgagcgtcaaattggtgcccatatcaagcctaattcggatctcacctttgagattgaattgcttgaagtgctcacccgcgattaa

SEQ ID NO: 4555 - protein, 111 aa, Shewanella sp. MR-4
MTELEVVDLVIGEGKEAVKGALITTQYRGFLQDGTQFDSSYDRGQAFQCVIGTGRVIKGWDQGLMGMKVGGKRKLFVPAHLAYGERQIGAHIKPNSDLTFEIELLEVLTRD

SEQ ID NO: 4556 - DNA, 471 bp, Shewanella sp. MR-7
  CDS (1)..(471): transl_table=11
atgaaaatgttacttgccgttgttgtgattgctggggtgattttttacttctttacctcgatgaataaccaaaaagcggcccaagaaaatatccgtttaggtaatgagtttttagcgcaaaacaaaaaccaagaaggggtgaaaaccaccgcctctgggttgcaatatcaagtgttacagcaaggaactggtactgttcatccgaaggcgagtgatactgtgactgtgcattatcacggcactttaattgatggaaccgtattcgatagctcggtcgagcgcggagaacccattgccttcccactcaatcgggtgattaaaggctggaccgaaggcgtacaactgatggttgaaggcgacaagtatcgcttctttattcctagcgaactggcctacggcaatcgcagcacaggcaaaattggcggtggttcggtactgatttttgatgttgagctgctaaaggtaaattaa

SEQ ID NO: 4557 - protein, 156 aa, Shewanella sp. MR-7
MKMLLAVVVIAGVIFYFFTSMNNQKAAQENIRLGNEFLAQNKNQEGVKTTASGLQYQVLQQGTGTVHPKASDTVTVHYHGTLIDGTVFDSSVERGEPIAFPLNRVIKGWTEGVQLMVEGDKYRFFIPSELAYGNRSTGKIGGGSVLIFDVELLKVN

SEQ ID NO: 4558 - DNA, 345 bp, Azoarcus sp. BH72
  CDS (1)..(345): transl_table=11
atgacccagaccaccaccgccagcggcctcatcatcgaagacctcgaagtcggcagcggcgatgtcgcggcgaagggccagatggtttcggtgcattacaccggctggctgaccgatggccgcaagttcgattccagcaaggaccgcaacgatccgttcaacttcccgctcggcgcgggccacgtcatccgcggttgggacgaaggcgtgcagggcatgcaggtgggcggcaagcgcaagctgacgattccgccggagctcggctacggcgcgcgtggcgccggcggcgtgatcccgcccaatgcgacgctggtgttcgaagtcgaactgctgaaagtgctgtaa

SEQ ID NO: 4559 - protein, 114 aa, Azoarcus sp. BH72
MTQTTTASGLIIEDLEVGSGDVAAKGQMVSVHYTGWLTDGRKFDSSKDRNDPFNFPLGAGHVIRGWDEGVQGMQVGGKRKLTIPPELGYGARGAGGVIPPNATLVFEVELLKVL

SEQ ID NO: 4560 - DNA, 330 bp, Neisseria meningitidis FAM18
  CDS (1)..(330): transl_table=11
atgggcggcctgattattgaagacttgcaagaaggcttcggaaaagaagcagttaaaggcaaagagattaccgtgcattacacaggttggctggaagacggtaccaaattcgactccagcctcgaccgccgccagccgctgaccatcacgctcggcgtcggacaagtcatcaaaggctgggacgaaggcttcggcggaatgaaggaaagcggcaaacgcaagctgaccatcccttctgaaatggcttacggcgcacacggtgccggcggcgtgattcccccgcacgccactttgatatttgaagtcgagctgctgaaagtgtacgaataa

SEQ ID NO: 4561 - protein, 109 aa, Neisseria meningitidis FAM18
MGGLIIEDLQEGFGKEAVKGKEITVHYTGWLEDGTKFDSSLDRRQPLTITLGVGQVIKGWDEGFGGMKESGKRKLTIPSEMAYGAHGAGGVIPPHATLIFEVELLKVYE

SEQ ID NO: 4562 - DNA, 360 bp, Acidovorax sp. JS42
  CDS (1)..(360): transl_table=11
atggcattcaccaccaccgcctccggcctgcagtatgaagacaccgtcgtcggcaccggcgcgcaggccacgcgcggccagtcggtgcgcgtgcattacaccggctggctctacaacgacggccagcaaggcgccaaattcgattccagccgcgaccgcaacgacccgttcgagtttcccctgggcgcgggcatggtcatcaagggctgggacgagggcgtgcaaggcatgcagatcggcggccagcgcacactgatcatcccggcagccctgggctacggcgcacgcggcgccggcggcgtgatcccgcccaacgccacgctgaagttcgacgtggagctgctggccgtcggcgtctga

SEQ ID NO: 4563 - protein, 119 aa, Acidovorax sp. JS42
MAFTTTASGLQYEDTVVGTGAQATRGQSVRVHYTGWLYNDGQQGAKFDSSRDRNDPFEFPLGAGMVIKGWDEGVQGMQIGGQRTLIIPAALGYGARGAGGVIPPNATLKFDVELLAVGV

SEQ ID NO: 4564 - DNA, 528 bp, Crocosphaera watsonii WH 8501 (Synechocystis sp. WH 8501)
  CDS (1)..(528): transl_table=11
atgcgcgaaattttgcttagtttcggggttattgccggttttagtttattgttactacttaattctatttttggtaactccagcaaacaaacggcgatcgcctcggaaaattcccccaacatcacccaagacacactaatggctttaaatattaataacagagaaatcacccaagaagagatagacaacgccgttaccactgagtctggactcaaatacattgatcttaaagaaggggacggagagagtccgcaaaagggacaaacggttacggtagattacaccggaactctagaaaatggcaaaaagttcgatagttcccgcgatcgcaagcaacccttttcctttaaaattggcgtgggacaagtgatcaaaggatgggatgaaggagttgcttctatgaaagttggaggccaacgcatcttgattattccccctgagttgggttatggttcccgaggggccggtggtgtaattcctggcaatgcaaccttaatttttgatgtggaattattagggactaaatag

SEQ ID NO: 4565 - protein, 175 aa, Crocosphaera watsonii WH 8501 (Synechocystis sp. WH 8501)
MREILLSFGVIAGFSLLLLLNSIFGNSSKQTAIASENSPNITQDTLMALNINNREITQEEIDNAVTTESGLKYIDLKEGDGESPQKGQTVTVDYTGTLENGKKFDSSRDRKQPFSFKIGVGQVIKGWDEGVASMKVGGQRILIIPPELGYGSRGAGGVIPGNATLIFDVELLGTK

SEQ ID NO: 4566 - DNA, 654 bp, Synechococcus sp. RS9917
  CDS (1)..(654): transl_table=11
gtgcgcgacatcctgatcagctccgccgtctgtgtggcctgcctgatggtggccctgatcagtcagatcgtggcgccctccaccgtggctgccgccgcccccggtgcgtcaagcaccagcctcacagccccggccatcgccaccagcagcgcatcggcttcagcaccgatggagctcgatccagacgatcccaaccccaccctttttgccatggctgctaacccgacccagcctgctgacccgacccagcccgccgacatcgcccaagctgatgcctccgccctcggcggcccgatggatgtggagaaatcccgtctcacggccagcggtctgcgcatcaccgatgtggtggtgggcaccggagccgaggcgagcccaggcgacaccgtggtggtgcactaccgcggcagcctcgaagacggctcgcaatttgatgccagctacgaccgcggcacccccttcagtttccctctcggcgccggtcgggtgatcaaaggctgggatgaaggcgtgcagggcatgcaggtgggtggcaagcgcaagctcgtgatcccccccgatctcggctacggcagccgcggtgccggtggtgtgattcctcccaacgccaccctgatcttcgacgtggaactgctggaggtgaagggccgttag

SEQ ID NO: 4567 - protein, 217 aa, Synechococcus sp. RS9917
MRDILISSAVCVACLMVALISQIVAPSTVAAAAPGASSTSLTAPAIATSSASASAPMELDPDDPNPTLFAMAANPTQPADPTQPADIAQADASALGGPMDVEKSRLTASGLRITDVVVGTGAEASPGDTVVVHYRGSLEDGSQFDASYDRGTPFSFPLGAGRVIKGWDEGVQGMQVGGKRKLVIPPDLGYGSRGAGGVIPPNATLIFDVELLEVKGR

SEQ ID NO: 4568 - DNA, 489 bp, Pseudoalteromonas tunicata D2
  CDS (1)..(489): transl_table=11
atgcctaaatctaatatgactaatatcattttatttatcctcatcgctgtgacatgtgttttcctctatcgaaacgcacaagcaaccaaagctcaagctgcaaacaacattgctgccgagcaaacctttttagccgccaaccgccaagttgaaaacgtgatggaaacaccgtctggtttacagtatttattattaagcgaaggcaatggcacaactcatcctgcagcgactagcacagttaatgtgcattatcatggtaccctcatcgatggcacaacatttgatagttcagttaagcgcggtgagccgattagctttgggcttaatcaagtgatccccggttggactgaaggcctacaactgatgaaagaaggcgataaaatgcgctttttcatcccgcacaaattagcctacggtaatcgcagcgttggcaaaatcccaccggcttcattactgatttttgatgtcgaattattagcaataaactaa

SEQ ID NO: 4569 - protein, 162 aa, Pseudoalteromonas tunicata D2
MPKSNMTNIILFILIAVTCVFLYRNAQATKAQAANNIAAEQTFLAANRQVENVMETPSGLQYLLLSEGNGTTHPAATSTVNVHYHGTLIDGTTFDSSVKRGEPISFGLNQVIPGWTEGLQLMKEGDKMRFFIPHKLAYGNRSVGKIPPASLLIFDVELLAIN

SEQ ID NO: 4570 - DNA, 474 bp, Photobacterium sp. SKA34
  CDS (1)..(474): transl_table=11
gtgtccaaaattgttattgccgttattgttgccgtattactcgcttttttcctttatcgttcatacaacaataaacaagttgctgctgaaaacattaagcaaggtgaagcttttcttgcggaaaataaattaaaagaaggcgtacaaacgacgccttctggtttgcaataccttgttttgcaaaaaggaacagggactgaacaccctaaggcgacagatagcgtaacagtgcattaccatggtactttaattaatggcactgtgtttgatagctcagtcgatcgtggtgaaaaaatttcttttccacttaaccgcgtgatcaaaggctggacggaaggcttacaacatatggttgttggtgaaaaaatgcgtttttttattccagctaacctagcctatggtaataacggtgcaggtagcattccaccgggctcagtgctcatttttgatgttgagttatttaaaatcaactaa

SEQ ID NO: 4571 - protein, 157 aa, Photobacterium sp. SKA34
MSKIVIAVIVAVLLAFFLYRSYNNKQVAAENIKQGEAFLAENKLKEGVQTTPSGLQYLVLQKGTGTEHPKATDSVTVHYHGTLINGTVFDSSVDRGEKISFPLNRVIKGWTEGLQHMVVGEKMRFFIPANLAYGNNGAGSIPPGSVLIFDVELFKIN

SEQ ID NO: 4572 - DNA, 471 bp, Neptuniibacter caesariensis
  CDS (1)..(471): transl_table=11
atggatctgttatttcccttaatcgttctggcaatcattgtttttattatcaggcaacgcagagcttcacagcagcaggcgcaagttaatctagaaaacggccgcgcatttatggagaagaatgccgatgaagaaggagttgttacaacagattcaggcctacaatatcgagtactagaagctggtagcggttccgatcacccaacggcaacctccaaagttaaagttcactatcatggtactttaatcgacggtacagttttcgatagctctgttgatcgtggtgaacccattgagtttggtttaaatcaggtcatccccggttggacagaaggtttgcaactgatggtcgttggagaaaaaacgcgcttttttattccggcagcactcgcttatgggaatggctcagcaggagtgatcacacccggatccacgctgatatttgacgtcgagcttttagatttcagctaa

SEQ ID NO: 4573 - protein, 156 aa, Neptuniibacter caesariensis
MDLLFPLIVLAIIVFIIRQRRASQQQAQVNLENGRAFMEKNADEEGVVTTDSGLQYRVLEAGSGSDHPTATSKVKVHYHGTLIDGTVFDSSVDRGEPIEFGLNQVIPGWTEGLQLMVVGEKTRFFIPAALAYGNGSAGVITPGSTLIFDVELLDFS

SEQ ID NO: 4574 - DNA, 612 bp, Oceanobacter sp. RED65
  CDS (1)..(612): transl_table=11
atgaaatttgagactccagcgcaaaaagtgagctacttgatcggtcgtcaagtgggtgatcaattaaaaggttcacaattcccaggctttgaactagatggcgtagtgaaaggtattcaggattcgatggcgggcgaagctatgccgtttagccaagaagaaatccaagaggcgtatcaagtgattcaagctgagcttgaaaagatgcaagcagaagctgcagaacaagccaaagcagtcggtgacgaattcctagccgaaaacgccaaaaaagaaggtgttcaagtaacggactctggtcttcagtatgaagtaattagtgaaggttcaggcgcgacgccaagtaaagaaaatacagtgcgtgtacattatcacggtaccttcatcgatggtcgtatgtttgatagttcagttgagcgtggtgagccagctgaattccctgtaggtggagtaatcgcaggctggacagaagcccttcaactgatgaaagaaggcgacaaatggcgtctaaccgtaccaagtgaattagcttatggtgcgcagggtagccaaggcgctattcctccacacagtgttttagtatttgaagtagaacttctaaacgtactgtaa

SEQ ID NO: 4575 - protein, 203 aa, Oceanobacter sp. RED65
MKFETPAQKVSYLIGRQVGDQLKGSQFPGFELDGVVKGIQDSMAGEAMPFSQEEIQEAYQVIQAELEKMQAEAAEQAKAVGDEFLAENAKKEGVQVTDSGLQYEVISEGSGATPSKENTVRVHYHGTFIDGRMFDSSVERGEPAEFPVGGVIAGWTEALQLMKEGDKWRLTVPSELAYGAQGSQGAIPPHSVLVFEVELLNVL

SEQ ID NO: 4576 - DNA, 477 bp, Alteromonadales bacterium TW-7
  CDS (1)..(477): transl_table=11
atgatcaatattattttggcggttgtgatcgctattttgtgcgttttaatatttaaaaacagtaaaaaggccaaacaacaggccattgctaatgcgcaaattgaaagcgactatttagtggcaaacgctaaagtagatggtgtattcgaaactgcatctggcttgcaatataaagtattgcacaaaggagaaaacagcaacacaccaagcccaacaagtatggtcaatgtgcattaccacggtacactcatcgacggtactgtgtttgatagctcagtagagcgcaagtcacctattagctttggtttacaccaagtaattaaagggtggaccgaggggttacagttaatgagccagggagataaatttcagttttatataccgcaccaattggcttatggcgaaaagcgggtagggagcattccaccagcatcactgcttatttttgaagtagaattgcttgcaatagagtcgtaa

SEQ ID NO: 4577 - protein, 158 aa, Alteromonadales bacterium TW-7
MINIILAVVIAILCVLIFKNSKKAKQQAIANAQIESDYLVANAKVDGVFETASGLQYKVLHKGENSNTPSPTSMVNVHYHGTLIDGTVFDSSVERKSPISFGLHQVIKGWTEGLQLMSQGDKFQFYIPHQLAYGEKRVGSIPPASLLIFEVELLAIES

SEQ ID NO: 4578 - DNA, 363 bp, Moritella sp. PE36
  CDS (1)..(363): transl_table=11
atgacccttaatgagattaacactatgacagaactacaaataacagacatcaacattggtgaaggcaaagaagccgttaagggcgctttgatcactacccagtaccgtggatttttaaatgacggtacccaattcgattcgtcttacgacaaaggtaaaccgtttcagtgtgtgattggtactggccgtgtgattaaaggttgggatcaaggcattatgggcatgaaagtgggcggtaaacgtaagttattcgtgccatcagagttagcttatggcgaacgtaaaatgggttcaatgatccctgcgcattcagacctaagttttgaaattgaattgttagaagtactgactcgcgacgaataa

SEQ ID NO: 4579 - protein, 120 aa, Moritella sp. PE36
MTLNEINTMTELQITDINIGEGKEAVKGALITTQYRGFLNDGTQFDSSYDKGKPFQCVIGTGRVIKGWDQGIMGMKVGGKRKLFVPSELAYGERKMGSMIPAHSDLSFEIELLEVLTRDE

SEQ ID NO: 4580 - DNA, 345 bp, Thauera sp. MZ1T
  CDS (1)..(345): transl_table=11
atgacccagaccaccaccgccagcgggctcgtcatcgatgaactcgagctcggcagcggcgataccgccgagaagggccgcatggtgtcggtgcattacaccggctggctcaccgacgggcgcaagttcgactcgagcaaggatcgcaacgatcccttcgtcttcccgctcggcgccggccacgtgatccgcggctgggacgagggcgtgcagggcatgcaggtgggcggcaagcgcaagctcaccatcccgcccgagcttggctacggcgcgcgcggcgccggcggtgtgatcccgcctaacgccaccctggtgttcgaggtcgaactgctcaaggtgctgtga

SEQ ID NO: 4581 - protein, 114 aa, Thauera sp. MZ1T
MTQTTTASGLVIDELELGSGDTAEKGRMVSVHYTGWLTDGRKFDSSKDRNDPFVFPLGAGHVIRGWDEGVQGMQVGGKRKLTIPPELGYGARGAGGVIPPNATLVFEVELLKVL

SEQ ID NO: 4582 - DNA, 510 bp, Verrucomicrobium spinosum DSM 4136
  CDS (1)..(510): transl_table=11
atgaaactcgcacctcttgctctctccctttcttccgccttgaccctgctcgtcactgggtgccagtccgaacctgacagcagcggtgccccggcggcaccgagcgcagcctccggctcaacctccggccaaagcccctttggctccaccgcctcggtcgatgcttcgggctgggtgaccacctccagcgggctccgctaccaagtgctggcctcgggccctgggacggggcagtctcccggcacgttggacatggtgacggtgcactacaagggcacgctcacgaacggcacggtgttcgacagctcactggatcgcggccagcccgccagctttggcgtgggccaggtgatcccgggctggaccgaggctctgcagctcatgaagccgggagacaagtggctgctctacatcccctcccaactggcctatggcaaccgcgccgtgggtggaaagatcccggcgaacagcgatttgatcttccaggtggagctgctcaaggttaattga

SEQ ID NO: 4583 - protein, 169 aa, Verrucomicrobium spinosum DSM 4136
MKLAPLALSLSSALTLLVTGCQSEPDSSGAPAAPSAASGSTSGQSPFGSTASVDASGWVTTSSGLRYQVLASGPGTGQSPGTLDMVTVHYKGTLTNGTVFDSSLDRGQPASFGVGQVIPGWTEALQLMKPGDKWLLYIPSQLAYGNRAVGGKIPANSDLIFQVELLKVN

SEQ ID NO: 4584 - DNA, 540 bp, Cyanothece sp. PCC 7424
  CDS (1)..(540): transl_table=11
atgcgagaaattttaattagttttggggtgattgttttttttgcagtattgttaattgtaagctctgttgttggtggtgaaaggaaaaccgaaatgatcgcatcgacccttaacccaagttctcctacagccttagctcaagagcaacagattgcccaaactctcaatacacaacaggaaaccaaagcaatggaagaaaacgcggtaacaaccccttcaggattaaaatatattgatattgaaacaggacagggagcaacgcccaccaaaggacaaaccgtaatcgttcactacactggcactttagaggatggaactaaatttgatagctcccgcgatcgcaatcgtcctttttccttcaaaattggggtaggacaagtgattaaaggttgggatgaaggagtaggaacgatgcaagttggaggtcgtcggactctaattattcctcccaacttagggtatggtgctaggggtgcaggaggtgtgattcctcctaatgcgaccttaatttttgatgtggaattattagagatcaaataa

SEQ ID NO: 4585 - protein, 179 aa, Cyanothece sp. PCC 7424
MREILISFGVIVFFAVLLIVSSVVGGERKTEMIASTLNPSSPTALAQEQQIAQTLNTQQETKAMEENAVTTPSGLKYIDIETGQGATPTKGQTVIVHYTGTLEDGTKFDSSRDRNRPFSFKIGVGQVIKGWDEGVGTMQVGGRRTLIIPPNLGYGARGAGGVIPPNATLIFDVELLEIK

SEQ ID NO: 4586 - DNA, 327 bp, Bombyx mori
  CDS (1)..(327)
atgggtgttactgttgaaactatcagtccaggagacggttcgacctaccccaaatcaggacagactgtagttgttcactacactggaacacttacgaacggcaaaaagtttgactcatcgcgtgaccgtggcaagcccttcaagttcaggatcggaaaatctgaagtaatccgtggctgggatgagggtgtggcacagatgtctgtaggtgagcgtgccaaattaacctgctctcctgactatgcttacggtcagcaaggccaccctggagtcatacctcccaactctacacttattttcgatgtagaacttctacgtctcgaataa

SEQ ID NO: 4587 - protein, 108 aa, Bombyx mori
MGVTVETISPGDGSTYPKSGQTVVVHYTGTLTNGKKFDSSRDRGKPFKFRIGKSEVIRGWDEGVAQMSVGERAKLTCSPDYAYGQQGHPGVIPPNSTLIFDVELLRLE

SEQ ID NO: 4588 - DNA, 330 bp, Maconellicoccus hirsutus
  CDS (1)..(330)
atgggcgttcaagtagaaacaatttctcctggtgatggttccacctatcccaaacatggacaaacggtagtggtacattacacaggaactttggtcgacggaaagaaattcgattcttcaagggaccgtggtacacctttcaaattcaaattgggtaaaggagaagtaatcaaaggttgggatgagggtgtagctcagttatgtgttggccaacgcgcaagattgatttgttcgcctgattatgcctatggatctcgcggacatccaggaattattccgccgaattccactttgatttttgatgttgaacttctgaaggtcgaatcatga

SEQ ID NO: 4589 - protein, 109 aa, Maconellicoccus hirsutus
MGVQVETISPGDGSTYPKHGQTVVVHYTGTLVDGKKFDSSRDRGTPFKFKLGKGEVIKGWDEGVAQLCVGQRARLICSPDYAYGSRGHPGIIPPNSTLIFDVELLKVES

SEQ ID NO: 4590 - DNA, 357 bp, Herbaspirillum seropedicae
  CDS (1)..(357): transl_table=11
atgtccacgatcacgacagcttccgggctgcaatatgaagaaatcaacattggcgcaggcgacgaagccaaggccggcagccatgtcacggtgcattacaccggctggctgcagaacgatgacggcagcgccggcagcaagttcgactccagcaaggaccgcaatgacccgttcgccttcccgctgggcgcaggccacgtgatcaagggctgggacgaaggtgtgcagggcatgaaggtcggcggcacccgcaagctgatcatcccggccagcctcggttatggcgcacgcggcgccggcggcgtgatcccacccaacgccacgctgatcttcgaagtcgaactgctggccgtctga

SEQ ID NO: 4591 - protein, 118 aa, Herbaspirillum seropedicae
MSTITTASGLQYEEINIGAGDEAKAGSHVTVHYTGWLQNDDGSAGSKFDSSKDRNDPFAFPLGAGHVIKGWDEGVQGMKVGGTRKLIIPASLGYGARGAGGVIPPNATLIFEVELLAV

SEQ ID NO: 4592 - DNA, 777 bp, Oryza sativa subsp. indica
  CDS (16)..(492)
gtactggagaagcgaatggggaagcgtcagcagcagcggcggctcgtccgcctcgccgtcgccgccgccgtcgttgtcgcggcggccctcatcctgaccgcttcggccaagaagtccggagatgtcacggagcttcagatcggtgtgaagtacaagccagagtcatgcaccctgcaagctcacaaaggagacaaaatcaaagtgcattatcgtgggtcactcactgatggatcagtgtttgattctagctatgacagaggtgacccctttgaatttactcttggaaacggccaagtgataaaaggttgggaccaagggttactaggtatgtgtgtcggtgaaaagaggaagctaaagatacctgcaaagatgggttatggggagagaggctccccaccgaagattccaggtggagcaacactaatctttgacacggagcttatcgccgtcaatggaaagacaaccggtggtgctagcaatagtgagctctaaggtcgtctttgatgttccacacaacgaagagttagcttgtgtagcgcctcctcaaaacagcggttcagtggtccttttaagagttcagtcaaaaaaggatgctgtttccttcatgttcatcgtgttacttcgaagttcaaagtattgttcaagccatccttaatttatggtacaattttttcatgtcctctgaactttttttcccctgatgggacagaatctgaaaaataagccttgttgcaatggtcttggagtcttcaacgtataaacactgcagctgttagc

SEQ ID NO: 4593 - protein, 158 aa, Oryza sativa subsp. indica
MGKRQQQRRLVRLAVAAAVVVAAALILTASAKKSGDVTELQIGVKYKPESCTLQAHKGDKIKVHYRGSLTDGSVFDSSYDRGDPFEFTLGNGQVIKGWDQGLLGMCVGEKRKLKIPAKMGYGERGSPPKIPGGATLIFDTELIAVNGKTTGGASNSEL

SEQ ID NO: 4594 - DNA, 339 bp, Vitis vinifera
  CDS (1)..(339)
atgggagtggagaaggtgttgttgagtgccggaaccggtcctaagccggtacgcggtcagaacgtcactgtccactgcactggatttggaaaaaatggtgatctttctcagaagttttggagcacaaaggatcctgggcagaagcctttcacatttaaaattggccaaggttctgttataaaaggatgggatgaaggtgtgatgggaatgcaagtgggagaagttgctcgtctgcagtgctctccagactacgcctatggccctaatggatttccagcatggggaatacaacctaactcggctttagtttttgagattgaagtcctaagcttgcagtga

SEQ ID NO: 4595 - protein, 112 aa, Vitis vinifera
MGVEKVLLSAGTGPKPVRGQNVTVHCTGFGKNGDLSQKFWSTKDPGQKPFTFKIGQGSVIKGWDEGVMGMQVGEVARLQCSPDYAYGPNGFPAWGIQPNSALVFEIEVLSLQ

SEQ ID NO: 4596 - DNA, 519 bp, Microcystis aeruginosa PCC 7806
  CDS (1)..(519): transl_table=11
atgaaatcaatgcgcgaaatcttgctcagttttgctattattgcggtttgtggcttatttttaatcgctgcttccctctttggtggaggggaaaaaaccaacgcgatcgccgccgaaaccaatccacccgctatcactcaaactattaataaggaaatcatctccatggatttagatcaagcagttaccaccgattcgggactaaaatacatcgatatagtggaaggaactggagaaagtcccgaaaaaggtcaaaaagtgactgttcactacacgggaaccctgacagacggcaaaaaattcgatagttctaaggatcgcaatcaaccttttacctttaccattggagttggtcaagtgatcaaaggatgggatgagggagtcgcatcgatgaaagtcggtgggcagcgtaccttaattatccccccagaattaggttatggtgcgcggggtgctggtggggtgattcctcccaacgcgactttacttttcgatgtggaattgttgggagtcaaataa

SEQ ID NO: 4597 - protein, 172 aa, Microcystis aeruginosa PCC 7806
MKSMREILLSFAIIAVCGLFLIAASLFGGGEKTNAIAAETNPPAITQTINKEIISMDLDQAVTTDSGLKYIDIVEGTGESPEKGQKVTVHYTGTLTDGKKFDSSKDRNQPFTFTIGVGQVIKGWDEGVASMKVGGQRTLIIPPELGYGARGAGGVIPPNATLLFDVELLGVK

SEQ ID NO: 4598 - DNA, 339 bp, Picea sitchensis
  CDS (1)..(339)
atgggagtggagaaggagattttaaggcccggcaatggcccgaagccgcgtcctgggcagagcgtgaccgtccattgcacaggctacggtaagaatgaggatctgtctcagaaattctggagcacaaaagatccaggacagaagcctttcacattcacgatagggcaggggaaagttatcaaaggttgggatgagggcgttttggacatgcaactgggagaggtttctagacttcggtgttcaccggattatggatatgggccaagtggattcgtagcctggggtatacgaccaaattctgttttggtttttgagattgaagttctgagtgtaaactag

SEQ ID NO: 4599 - protein, 112 aa, Picea sitchensis
MGVEKEILRPGNGPKPRPGQSVTVHCTGYGKNEDLSQKFWSTKDPGQKPFTFTIGQGKVIKGWDEGVLDMQLGEVSRLRCSPDYGYGPSGFVAWGIRPNSVLVFEIEVLSVN

SEQ ID NO: 4600 - DNA, 468 bp, Zea mays
  CDS (1)..(468)
atggggaagatgcggcagctgatctgcctcgtggccgccgtcgccgccgcggccatcctcctgacagcgtcggccaagaagtccggcgacgtcaccgagcttcagatcggcgtcaagtacaagcctgagtcatgtacgctgcaagcacacaaaggagacaaaattaaggttcactatcgtgggacactcactgatggatcagttttcgattctagctatgacagaggtgacccgtttgaattcactcttggaaatggccaagtgataaaaggttgggaccaaggattgctcggtatgtgcgtgggtgaaaagaggaagctaaagatacctgcaaagatgggttatggtgagcgaggctccccaccaaagattccaggtggagcaactctgatcttcgacacggagcttatcgccgtcaacgggaagacatccggcggtgcaaaggcagagagtgacagtgagctctga

SEQ ID NO: 4601 - protein, 155 aa, Zea mays
MGKMRQLICLVAAVAAAAILLTASAKKSGDVTELQIGVKYKPESCTLQAHKGDKIKVHYRGTLTDGSVFDSSYDRGDPFEFTLGNGQVIKGWDQGLLGMCVGEKRKLKIPAKMGYGERGSPPKIPGGATLIFDTELIAVNGKTSGGAKAESDSEL

SEQ ID NO: 4602 - DNA, 606 bp, Synechococcus sp. PCC 7335
  CDS (1)..(606): transl_table=11
ttggatcaagaagagcctacctatattgaaattatgcgagaaatattaattagctttggcgtggtagtggcttgctgcgcggtactgctggtcgctcaatttaccggtggtgatggtgagagagcagtagcagatagcgtttctagtacgcctgcgggtgtagagcaatcagagaccttagttgctcaaagtgcgagcgatttgttagaaaacgataccccagaggatgcgatggctgaagatgcaatggtgccagatgaagaggtagttacgacggattctggtttgcagtacgtagtgattgccgagggtgatggcgcgtcgccacagccaggcaatcgggtgtttgtccattatgtcggtacgctagaagacgggactaagttcgatagttcgcgcgatcgcggcaagccgttcaatttcactattggtcgcggccaggtgattaaaggctgggatgagggcgttgctatgatgcaagtcggcgatagacgtaagctgattattccccctgatctgggctatggcgctcgtggtgcggggggtgtgattccgccaaacgccaccttaatcttcgacgtagagctgctgaggatcggcagctaa

SEQ ID NO: 4603 - protein, 201 aa, Synechococcus sp. PCC 7335
MDQEEPTYIEIMREILISFGVVVACCAVLLVAQFTGGDGERAVADSVSSTPAGVEQSETLVAQSASDLLENDTPEDAMAEDAMVPDEEVVTTDSGLQYVVIAEGDGASPQPGNRVFVHYVGTLEDGTKFDSSRDRGKPFNFTIGRGQVIKGWDEGVAMMQVGDRRKLIIPPDLGYGARGAGGVIPPNATLIFDVELLRIGS

SEQ ID NO: 4604 - DNA, 342 bp, Gibberella fujikuroi
  CDS (1)..(342)
atgggtgttcagaagaccatcatctccgagggcagcggcccctctcccaaggttggcgaaaaggtcaccatccaatacaccggctgggtcaaggacgagtccaagcctgacaacaagggtgatcagttcgacagctccgtcggccgcggtgccttcgtcgttaccattggtgttggccaggtcatcaagggctgggatgagggtgttacccaaatgcagctcggcgagaaggcccttctcgacatcacccctgactacggctatggcgcccgtggcttccccggcgccatccctcccaacgccactctcctcttcgaggttgagctccagaagatcaactaa

SEQ ID NO: 4605 - protein, 113 aa, Gibberella fujikuroi
MGVQKTIISEGSGPSPKVGEKVTIQYTGWVKDESKPDNKGDQFDSSVGRGAFVVTIGVGQVIKGWDEGVTQMQLGEKALLDITPDYGYGARGFPGAIPPNATLLFEVELQKIN

SEQ ID NO: 4606 - DNA, 330 bp, Diaphorina citri
  CDS (1)..(330)
atgggcgtagatgtggaaactctttcccccggtgatggccaaacctaccctaagcctggccaggttgttgttgtccactacaccggaacattgactgacggaaccaagtttgactcctccagagacagaggagtgcctttcaaattccgacttggcaagggtgatgtcatcaaaggatgggatcacggcattgctcagttgtgtgttggtcaaactgccaaactcacttgctctcctgactttgcctatggttctcgaggacatccaggtatcattcctcccaacgccaccttgatatttgatgttgaattactccgagtagagccataa

SEQ ID NO: 4607 - protein, 109 aa, Diaphorina citri
MGVDVETLSPGDGQTYPKPGQVVVVHYTGTLTDGTKFDSSRDRGVPFKFRLGKGDVIKGWDHGIAQLCVGQTAKLTCSPDFAYGSRGHPGIIPPNATLIFDVELLRVEP

SEQ ID NO: 4608 - DNA, 405 bp, Botryllus schlosseri
  CDS (1)..(405)
atgagattgttacctttagttgcgtgcgtcgcagttttctgtgtgacggtgcatgcgaaagtagacaaactgcaaatcggagtcttgaaacgggtggaatgcgaacgtaaaagcgggagcggagatgtgctcgatatgcattacaccggtacgctggaagatgggtcgaaattcgacagctcacgggaccgcgatactcctttcaccttcactctaggtcaagggtatgtcatcaagggttgggacaaaggtcttctcggaatgtgtgaaggagagcgaagaaagttgaagattcccagcgacatgggatacggtgatcgtggatctccgcctaagataccaggtggcgccaccctcatcttcgatgtagagttgttgaagatcaaagataaagacgagctttga

SEQ ID NO: 4609 - protein, 134 aa, Botryllus schlosseri
MRLLPLVACVAVFCVTVHAKVDKLQIGVLKRVECERKSGSGDVLDMHYTGTLEDGSKFDSSRDRDTPFTFTLGQGYVIKGWDKGLLGMCEGERRKLKIPSDMGYGDRGSPPKIPGGATLIFDVELLKIKDKDEL

SEQ ID NO: 4610 - DNA, 354 bp, Botryotinia fuckeliana
  CDS (1)..(354)
atgggtgtcacaaagcatgtcttgaaggagggtactggtgcaatccctaagcctggagataccgtcaccattcaatacactggatggttgaaggacactaccaagggagacactctcgagagccaaaagggcaaccaattcgattcttctgtcaaccgtggtccttttgttgttcaaatcggtgttggtcaagtcatcaagggctgggacgagggtgttactcagatgaagctcggtgagaaggctacattggacattacccctgattacgcctatggtgcccgtggtttcccccctgtcatcccagccaactcaactcttctctttgacgttgagctccaaaagatcaactaa

SEQ ID NO: 4611 - protein, 117 aa, Botryotinia fuckeliana
MGVTKHVLKEGTGAIPKPGDTVTIQYTGWLKDTTKGDTLESQKGNQFDSSVNRGPFVVQIGVGQVIKGWDEGVTQMKLGEKATLDITPDYAYGARGFPPVIPANSTLLFDVELQKIN

SEQ ID NO: 4612 - DNA, 339 bp, Solanum lycopersicum
  CDS (1)..(339)
atgggagtggagaaggaagttatcagagccggaaatggccccaaaccgcagcctggtcaaactgttaccgtccactgcactggttacgggaaagatagagacctgagtcagaagttctggagcactaaggatccaggccagcagcctttctctttcaagatcggccaaggcaaagttatcaaaggatgggatgaaggagtactgggcatgcaattgggagaagttgctcgattaacgtgcacccctgattatgcttatggtgctggtggatttccagcatggggtattcagcccaactcagttctggtttttgagattgaagtcctaggtgcacaatga

SEQ ID NO: 4613 - protein, 112 aa, Solanum lycopersicum
MGVEKEVIRAGNGPKPQPGQTVTVHCTGYGKDRDLSQKFWSTKDPGQQPFSFKIGQGKVIKGWDEGVLGMQLGEVARLTCTPDYAYGAGGFPAWGIQPNSVLVFEIEVLGAQ

SEQ ID NO: 4614 - DNA, 363 bp, Ixodes scapularis
  CDS (1)..(363)
atggcccagtgttttcaaatcacgcccggtgtcctcaaaactgtcatacagccgggcttcggcccgagacccaacgtcggcgacaacatcaccgtccactgcacaggtcttctcacgaatccgccgaggaaattctggagcacaagagatcctggacagcagccgttctccttccgggttggcgttggcgaagtgatcagaggatgggacgaaggctgcctctccatgcagaagaatgaggtgtcaaggctcacggtgtgcggccagaaagcttacggagcgcaaggcttccctgcgtgggggatcccccccaatgcggacctgcagttcgagatccagatcctggccatcaacggcatgtga

SEQ ID NO: 4615 - protein, 120 aa, Ixodes scapularis
MAQCFQITPGVLKTVIQPGFGPRPNVGDNITVHCTGLLTNPPRKFWSTRDPGQQPFSFRVGVGEVIRGWDEGCLSMQKNEVSRLTVCGQKAYGAQGFPAWGIPPNADLQFEIQILAINGM

SEQ ID NO: 4616 - DNA, 339 bp, Malassezia pachydermatis
  CDS (1)..(339)
atgggtgtgactgtggaatcgatctcgaacggcgacggcaagaccttccctaaggccggtgacactgtagacatgcactacgtgggtacccttcagtcgaacggtaacaagttcgactcgtcgcgcgaccgcggccagcctttccgcacccgcatcggtgtaggccaagtcatccgtggttgggacgagggtgtcccccagctttcacttggccagaaggcccgcctgatctgcaccccggactacgcttacggtgctcgtggcttccctcctgtgattcccccgaactcgacccttgtcttcgaggtggaacttcttgccatcaacggcaagcagtaa

SEQ ID NO: 4617 - protein, 112 aa, Malassezia pachydermatis
MGVTVESISNGDGKTFPKAGDTVDMHYVGTLQSNGNKFDSSRDRGQPFRTRIGVGQVIRGWDEGVPQLSLGQKARLICTPDYAYGARGFPPVIPPNSTLVFEVELLAINGKQ

SEQ ID NO: 4618 - DNA, 492 bp, Streptomyces rishiriensis
  CDS (1)..(492): transl_table=11
atgtgtccggctggtccgacggcttccgacggaagtgatgaggctgtgatgagtgaaccgacaaagcccgaggtcgacgttccagagggcgacgcgcctaccgagctgaccatccgggacctgatcgtcggtgacggggtcgaggtcaagccgggcatggtggtcagggtccactatgtcggggtgactttcgagtccgggaaggagttcgatgcctcctgggatcggggccagccgttcaagttcgccgtgggcagtggcaaggtcatcaagggctgggaccgaggggtgagagggatgaacgtcggcggtcggcgcgagatcatcgttcctccgcgtcttggatacggcaatcagtcgccttcgccgttgatcccgccgagctcgaccctggtcttcgtggtggacctgctggacgcgtattccagcgcaaccgggtggagcaacgcccagcgggggcacggagtcatcccagggcgggcggaaccctag

SEQ ID NO: 4619 - protein, 163 aa, Streptomyces rishiriensis
MCPAGPTASDGSDEAVMSEPTKPEVDVPEGDAPTELTIRDLIVGDGVEVKPGMVVRVHYVGVTFESGKEFDASWDRGQPFKFAVGSGKVIKGWDRGVRGMNVGGRREIIVPPRLGYGNQSPSPLIPPSSTLVFVVDLLDAYSSATGWSNAQRGHGVIPGRAEP

SEQ ID NO: 4620 - DNA, 639 bp, Photorhabdus luminescens subsp. laumondii
  CDS (1)..(639): transl_table=11
ttgatcacaggtattttcatggcaaaactttcttttgactctatcgaagcacaagcaagttatggggttggcttgcaagttggtcagcaattactggagtctggcctgcaaggtctggaacctgaagcgttgttagcggggttatgcgatgcgctggaaaatcattctccagcggtgccggtcgatatattgcatcgtgccttacgtgaaatgcatgaacgtgcagatggtgtgcgtcgtgaacgtcagcaagttatggcagaagagggacagaaatttctggcagaaaatgctcagcgtgacggtataagcacgacagaatctggtttacagttctctgtactaaagcagggtgatggtgcaattcctgcccatactgaccacgtgcgtgtccattacacggggcgtctgattgatggcaccgtgtttgacagctcagtacagcgtggtgaacctgctgaatttcctgtgaatggggtgattgctggatggattgaagcattgacgttgatgcctgtcggttctaaatgggaactttatatcccttataatttggcttatggcgagcgtggtgccggtgcatcgattcccccatatagcactctgattttcgaggtggaattgttggatattctgtaa

SEQ ID NO: 4621 - protein, 212 aa, Photorhabdus luminescens subsp. laumondii
MITGIFMAKLSFDSIEAQASYGVGLQVGQQLLESGLQGLEPEALLAGLCDALENHSPAVPVDILHRALREMHERADGVRRERQQVMAEEGQKFLAENAQRDGISTTESGLQFSVLKQGDGAIPAHTDHVRVHYTGRLIDGTVFDSSVQRGEPAEFPVNGVIAGWIEALTLMPVGSKWELYIPYNLAYGERGAGASIPPYSTLIFEVELLDIL

SEQ ID NO: 4622 - DNA, 327 bp, Schizophyllum commune
  CDS (1)..(327)
atgggcgtcacggtcgaagttatccagcccggcgacggcaagacgttcccgcagaaaggccagacggtcagtatccactatgtcggtacgctgcaggatgggaccaagttcgactcgagccgggaccggggaacgccgttcgagacggccatcggcgtggggcgggtcatcaagggctgggacgagggtgtcccgcagctctctgtcggcaccaccgcgcgcctgatctgcaccccggactacgcgtacggctcgcgcggcttccccccggtcatcccgccaaatgcgaccctcacgtttgaggtcgagcttctgtcgctgcagtag

SEQ ID NO: 4623 - protein, 108 aa, Schizophyllum commune
MGVTVEVIQPGDGKTFPQKGQTVSIHYVGTLQDGTKFDSSRDRGTPFETAIGVGRVIKGWDEGVPQLSVGTTARLICTPDYAYGSRGFPPVIPPNATLTFEVELLSLQ

SEQ ID NO: 4624 - DNA, 327 bp, Manduca sexta
  CDS (1)..(327)
atgggcgtgaccgtagacactattaccccaggagatgagtccacataccccaagaatggacagaccgtagtagtgcactacacgggcacactcaccagcgggaagaagttcgattcctcgcgcgaccgcggcaagcccttcaagttcaggattggcaagggagaggtgatccgaggctgggacgagggtgttgctaagatgtcagtaggagagcgcgccaagctgacttgcacccccgactacgcctacggccagcaggggcacccgggcgtcatcccacccaactcgaccctcatcttcgacgtggaactcttgcgtctcgaataa

SEQ ID NO: 4625 - protein, 108 aa, Manduca sexta
MGVTVDTITPGDESTYPKNGQTVVVHYTGTLTSGKKFDSSRDRGKPFKFRIGKGEVIRGWDEGVAKMSVGERAKLTCTPDYAYGQQGHPGVIPPNSTLIFDVELLRLE

SEQ ID NO: 4626 - DNA, 339 bp, Arabidopsis thaliana
  CDS (1)..(339)
atgggtgtggagaagcaagtcatcagacccggcaacggtcccaaacccgctccgggccaaaccgtcaccgtccattgcaccggattcgggaaagatggtgatctatcccagaagttctggagtacaaaggacgagggacaaaaacctttctcgttccaaatcggtaaaggtgctgtgatcaaaggatgggatgaaggcgttatcggaatgcaaattggagaggttgctcgcttgcggtgctcatcggattacgcatatggcgctggtggatttccggcatgggggatccagccaaactctgttctcgactttgaaatcgaagtactgagcgtgcagtaa

SEQ ID NO: 4627 - protein, 112 aa, Arabidopsis thaliana
MGVEKQVIRPGNGPKPAPGQTVTVHCTGFGKDGDLSQKFWSTKDEGQKPFSFQIGKGAVIKGWDEGVIGMQIGEVARLRCSSDYAYGAGGFPAWGIQPNSVLDFEIEVLSVQ

SEQ ID NO: 4628 - DNA, 327 bp, Drosophila melanogaster
  CDS (1)..(327)
atgggcgtacaagtagttccaattgctcctggtgatggcagcacctatcccaagaatggccaaaaggtcacggtccactacaccggcaccctggacgatggcaccaagttcgattcgtcgcgcgaccgcaacaagccattcaagttcaccatcggcaagggcgaggtcatccgtggctgggatgagggagttgcccagttgagcgtcggccagcgcgccaagctgatttgctcgccggactatgcctacggtagccgtggccaccccggcgtcattccgcccaactccaccctcaccttcgacgtcgagctgctcaaggtcgaatag

SEQ ID NO: 4629 - protein, 108 aa, Drosophila melanogaster
MGVQVVPIAPGDGSTYPKNGQKVTVHYTGTLDDGTKFDSSRDRNKPFKFTIGKGEVIRGWDEGVAQLSVGQRAKLICSPDYAYGSRGHPGVIPPNSTLTFDVELLKVE

SEQ ID NO: 4630 - DNA, 339 bp, Vicia faba
  CDS (1)..(339)
atgggtgttgagaagcaaatcataagagctggaaccggtcccaaccctagccgcggccagaacgtcaccgttcactgcaccggttacggtaaaaacggtgacctttctcagaagttctggagcacgaaggatcctggccagaatccattcactttcaaaatcggccaaggttctgtcatcaaaggatgggatgaaggtgtccttggcatgcaactcggcgaagttgctcgtcttcggtgctctcctgattatgcctatggtgctggtggttttcctgcctggggaatacagcccaactctgtcttggagtttgagatcgaggtcttaagggcacaatga

SEQ ID NO: 4631 - protein, 112 aa, Vicia faba
MGVEKQIIRAGTGPNPSRGQNVTVHCTGYGKNGDLSQKFWSTKDPGQNPFTFKIGQGSVIKGWDEGVLGMQLGEVARLRCSPDYAYGAGGFPAWGIQPNSVLEFEIEVLRAQ

SEQ ID NO: 4632 - DNA, 339 bp, Aspergillus fumigatus
  CDS (1)..(339)
atgggtgtcaccaaggaactcaagtcccccggcaacggtgtcgacttccccaagaagggcgactttgtcaccatccactacactggtagactgaccgatggctcaaagttcgacagctccgtcgaccggaacgaacccttccagacccagatcggtactggccgtgtcatcaagggttgggatgagggtgtccctcagatgagccttggcgagaaggctgtcctcaccattacccctgactacggctacggcgctcgtgggttccctcccgtcatccctggcaactctaccctcatcttcgaggttgagcttcttggcatcaacaacaagagggcttag

SEQ ID NO: 4633 - protein, 112 aa, Aspergillus fumigatus
MGVTKELKSPGNGVDFPKKGDFVTIHYTGRLTDGSKFDSSVDRNEPFQTQIGTGRVIKGWDEGVPQMSLGEKAVLTITPDYGYGARGFPPVIPGNSTLIFEVELLGINNKRA

SEQ ID NO: 4634 - DNA, 327 bp, Emericella nidulans
  CDS (1)..(327)
atgggtgtcgaagttcagcgcatttctccaggtgacggcaagaatttccccaagcccggggacactgtcagcatccactacaccggaaccctggccgacggtagcaaatttgacagctcccgcgatcgccccggcacctttgtcacccagattggtgttggccgtgtcatcaagggctgggacgagggtgttctccagctgagcgttggcgaaaaggccaagttgatctgtactccggattacgcctacggcgctcggggtttccctcccgtcattcctcccaacgctaccctgaccttcgaggttgagcttctcaagatcaactaa

SEQ ID NO: 4635 - protein, 108 aa, Emericella nidulans
MGVEVQRISPGDGKNFPKPGDTVSIHYTGTLADGSKFDSSRDRPGTFVTQIGVGRVIKGWDEGVLQLSVGEKAKLICTPDYAYGARGFPPVIPPNATLTFEVELLKIN

SEQ ID NO: 4636 - DNA, 363 bp, Neurospora crassa
  CDS (1)..(363)
atgactattccccagcttgacggtcttcagatcgaggtccagcaggagggccagggcacccgtgagacccgtcgcggcgacaacgtcgacgtccactacaagggtgtcctcaccagcggtaagaagttcgacgctagctacgaccgtggcgagcctctcaacttcaccgttggccagggccaggtcatcaagggctgggatgagggtctcctcggcatgaagattggcgagaagcgcaagctcactatcgcccctcacctcgcctacggcaaccgcgccgtcggtggcatcatccccgccaactccaccctcatcttcgagaccgagctcgtcggtatcaagggtgtccagaagggcgagtaa

SEQ ID NO: 4637 - protein, 120 aa, Neurospora crassa
MTIPQLDGLQIEVQQEGQGTRETRRGDNVDVHYKGVLTSGKKFDASYDRGEPLNFTVGQGQVIKGWDEGLLGMKIGEKRKLTIAPHLAYGNRAVGGIIPANSTLIFETELVGIKGVQKGE

SEQ ID NO: 4638 - DNA, 363 bp, Aspergillus fumigatus
  CDS (1)..(363)
atgggcctcgaaaaacaaaccctccggatgggcaatggcaaagaccacccgcagcccggcgaccccgtcgagctcaactacactgggtatctgtacgacgaatcgaacccagaccaccataaagggaaggaattcgatagctcgaagagacgcggcccgctgaaggcgactatcggggcgggagatgtcattcggggctgggacgagggcgttcggcagatgagtcttggggagaaggcgattttgaccatgagtggggagtatgcgtatggagagaagggcttcccggggctgattccgccgaatgcttcacttgtttttgaggtcgagcttctcaagattaaggaccatggtcttgattag

SEQ ID NO: 4639 - protein, 120 aa, Aspergillus fumigatus
MGLEKQTLRMGNGKDHPQPGDPVELNYTGYLYDESNPDHHKGKEFDSSKRRGPLKATIGAGDVIRGWDEGVRQMSLGEKAILTMSGEYAYGEKGFPGLIPPNASLVFEVELLKIKDHGLD

SEQ ID NO: 4640 - DNA, 405 bp, Aspergillus fumigatus
  CDS (1)..(405)
atgcgcattctacttctctccgcccttttcctctccctcaccaccctcgtcctctccgccgatctcggcatcgagaagactcatgtcgtcgaatgcaaccgtaaaaccacaaagggcgatacagtccacatgcactaccggggcaccctcgcggcggatggttccgagttcgactcgagctatggtcgcaaccagccgttgaagttcaagcttggtgcggggcgggtcattaaggggtgggatgaagggcttttggatatgtgtgtgggagagaagcggacactgacgatcccgcctgagtatgggtatggcgagcgcgggattgggcccatccctggcggcgcgacgttgatttttgagacggagttggtgcagattgaaggggttaataatgatgagctgtag

SEQ ID NO: 4641 - protein, 134 aa, Aspergillus fumigatus
MRILLLSALFLSLTTLVLSADLGIEKTHVVECNRKTTKGDTVHMHYRGTLAADGSEFDSSYGRNQPLKFKLGAGRVIKGWDEGLLDMCVGEKRTLTIPPEYGYGERGIGPIPGGATLIFETELVQIEGVNNDEL

SEQ ID NO: 4642 - DNA, 411 bp, Candida glabrata
  CDS (1)..(411)
atgttgtcacaaatttggattcttttcacctttatggtgtgtgttattgcttctaagtcaaagtcagatggcttgaagtttgaaattaccaagaagatcccaattagcaaatgtaagttaaaggcccttccaggtgacatggtctctgttcattacactggttctttggcagaaaatggtaaggtctttgactccagtttgcgcagaaatgagccaatccaattcaaactaggtgctggtcaagtcattgccggctgggaacaaggtatcacaggcatgtgtctaggtgagaagcgtacccttcacatccctccagaattggcctatggttctcgcggtgctggtggtgtaattccacctaatgctgtgctggattttgatgttgaactagttgacattgcccgcaactaa

SEQ ID NO: 4643 - protein, 136 aa, Candida glabrata
MLSQIWILFTFMVCVIASKSKSDGLKFEITKKIPISKCKLKALPGDMVSVHYTGSLAENGKVFDSSLRRNEPIQFKLGAGQVIAGWEQGITGMCLGEKRTLHIPPELAYGSRGAGGVIPPNAVLDFDVELVDIARN

SEQ ID NO: 4644 - DNA, 426 bp, Cryptococcus neoformans
  CDS (1)..(426)
atgtaccatccaaaggcccttataatcgctcttcttttctcactgtccctcattctcgccgcaaaatcagccgagcagcttcagatcggtgtcaagtatgtgcctgaagagtgtccagtcaagtcccgcaaaggtgacaggctttccatgcactacactgggacccttgctaaggatggctccaaatttgacagttctttagacagaaacaggccctttgagttcacgctcggagctgggcaagtcattaagggctgggatcaaggccttcttgatatgtgcatctctgaaaagcgcaagttgaccattccttctcatctcgcatacggtgaacgtggccaccctcctgtcattcctccccaaagtactctcgtcttcgaagtggagctgttgggtatcaagaaccgtcatgtcgacgaactttaa

SEQ ID NO: 4645 - protein, 141 aa, Cryptococcus neoformans
MYHPKALIIALLFSLSLILAAKSAEQLQIGVKYVPEECPVKSRKGDRLSMHYTGTLAKDGSKFDSSLDRNRPFEFTLGAGQVIKGWDQGLLDMCISEKRKLTIPSHLAYGERGHPPVIPPQSTLVFEVELLGIKNRHVDEL

SEQ ID NO: 4646 - DNA, 408 bp, Debaryomyces hansenii
  CDS (1)..(408): transl_table=12
atgttattaaaatctctctttttactctttcttacagcaattgcttttgcatctgaactccagattggaatcttaacttcagtacctgacgacaagtgcaaagttaaatcaaagcctggtgatcttattagcgttcactatgaaggtaaattagaggatggaactgtctttgattcgtcgtattccagagggcagccaatttccttccagttgggcattggtcaggttattcaaggttgggatcaaggattgactagaatgtgtattggtgaaaaaagaaaattgactattccttctcatttagcgtatggagatagaggtgttggtcctattcctgcaaaagcaactcttgtttttgttgctgagttagttgatattgctggctctagtaaacatgatgagctttga

SEQ ID NO: 4647 - protein, 135 aa, Debaryomyces hansenii
MLLKSLFLLFLTAIAFASELQIGILTSVPDDKCKVKSKPGDLISVHYEGKLEDGTVFDSSYSRGQPISFQLGIGQVIQGWDQGLTRMCIGEKRKLTIPSHLAYGDRGVGPIPAKATLVFVAELVDIAGSSKHDEL

SEQ ID NO: 4648 - DNA, 408 bp, Emericella nidulans
  CDS (1)..(408)
atgcgcgtcccaattattaccactctcctcactctcgccctcaccggcctctcgcaagccgcctctctcggcgtcgaaaccacccacggtgtcgagtgcaaccgcaagacaacaaagggcgacacagttaagatgcattaccgtggcaccctcgctgaagacggatctcagttcgatgcgagctatgatcggggcacaccattcaaattcaagctaggggctggacgtgtcattaagggatgggacgaaggactgctcgatatgtgcgttggcgagaagagaaccctgacgattccgccggagtatgggtacggcgatcgcggcattggacccattcctggtggtgcgacgttgatcttccaaacggaactgctggagattgagggcgtgcccaaggatgagctttga

SEQ ID NO: 4649 - protein, 135 aa, Emericella nidulans
MRVPIITTLLTLALTGLSQAASLGVETTHGVECNRKTTKGDTVKMHYRGTLAEDGSQFDASYDRGTPFKFKLGAGRVIKGWDEGLLDMCVGEKRTLTIPPEYGYGDRGIGPIPGGATLIFQTELLEIEGVPKDEL

SEQ ID NO: 4650 - DNA, 864 bp, Gibberella zeae
  CDS (277)..(864)
atggagatgcaagatgtaacaacccagtgtcagatccaaatggaaaacatcattcaacgggccgcatcctattggccaatagcattatgcacaggtggacctaatgaatcccggcccatccaccatacatcgacaatctcgcatcacactgcctcacttatcgacgtcacaccctcagagttccaggcttctcaacgacttcccggccgttgtgacttccaattctacgacacctacagtatactccacgtccctgtctccgccccgaccaccatcatgaaggctgctctcttcctttccgctctcgcctcaaccgccgttggcgttgttgctgaggagctcaagatcgatgtgactcttcccgttatttgcgaacgcaagacacagaagggagacggggttcacatgcactaccgtggtaccctcaaggactcgggcaagcagttcgatgctagctacgatcgcggtactcccctttccttcaaggtcggtgctggccaggttatcaaggggtgggacgagggtcttcttgacatgtgcattggtgagaagcgagtcctgaccatcccccctgagttcggctacggccagcgagccattggccctatccccgccggctcaaccctagttttcgagacagagctcgtcggaattgacggcgtccccaaacccgagaagatcgagaccaaggttgtcgaaggcgccgagtctgccgccgaggccatcagcgaggctaccgaggctgctgcgacagcttcccagaaggttgccggcaaggttgctgaggccatcgtcgatgctgctaaggctgccaagaccatcattgctgataccgatgacgctcctgagcacgaggagctgtaa

SEQ ID NO: 4651 - protein, 195 aa, Gibberella zeae
MKAALFLSALASTAVGVVAEELKIDVTLPVICERKTQKGDGVHMHYRGTLKDSGKQFDASYDRGTPLSFKVGAGQVIKGWDEGLLDMCIGEKRVLTIPPEFGYGQRAIGPIPAGSTLVFETELVGIDGVPKPEKIETKVVEGAESAAEAISEATEAAATASQKVAGKVAEAIVDAAKAAKTIIADTDDAPEHEEL

SEQ ID NO: 4652 - DNA, 558 bp, Podospora anserina
  CDS (1)..(558)
atgcaaggccttctgctctcgctttccctgctcgcctcggcagctgtcggcgtcctcgcctccgatgacctcaagatcgatgtcacgctccccgttgagtgcgatcgcgtaaccaagaagggcgacaagatcaatgtccattacaagggcacactcaagtccaatggcgagaagttcgattcgagctacgaccgtcaatcgccattctcattcaagcttggagctggcatggttatcaagggttgggacgagggtctcgtcgatatgtgcatcggcgagaagcggacattgaccattggcccaagctacggctatggtgaccgcaatgttggacctattcccgctggatctactcttgtcttcgaaacggaattggttggcattgagggtgtgccaaaacccgaatcgattgttaccaagtcggccaccgatgctcccgagtccacggcaagcgcgaaggttgttgaaaaggtggccagcgtcgccaagcaggcggctgaggttgttgagaccatcattgccgacaccgacgatactcaggagcacaacgagctctag

SEQ ID NO: 4653 - protein, 185 aa, Podospora anserina
MQGLLLSLSLLASAAVGVLASDDLKIDVTLPVECDRVTKKGDKINVHYKGTLKSNGEKFDSSYDRQSPFSFKLGAGMVIKGWDEGLVDMCIGEKRTLTIGPSYGYGDRNVGPIPAGSTLVFETELVGIEGVPKPESIVTKSATDAPESTASAKVVEKVASVAKQAAEVVETIIADTDDTQEHNEL

SEQ ID NO: 4654 - DNA, 435 bp, Yarrowia lipolytica
  CDS (1)..(435)
atggcccgaattattgttctcattgttgccttcatggctcttatcgccggcgtttttgccactgaggagaagctggccaagctccagatcggcattctcaagaagatttctcccgaggagtgcacccagaaggccagaaagggcgacaccgtgtctgtgcactacaccggcaagcttgaggacggcaccgtgttcgactcctccgtcgagcgaggccagcccatccagttcccccttggcactggacgagtcatccccggctgggaccagggtattctcggcatgtgcgttggcgagaagcgaaagctcaccatcccccctcatcttgcctacggcaagcagggcgctggccgagtcattcctccggactccaccctcattttcaccaccgagctcgtttctatcgacaacgacggtgaccgagatgagctctaa

SEQ ID NO: 4655 - protein, 144 aa, Yarrowia lipolytica
MARIIVLIVAFMALIAGVFATEEKLAKLQIGILKKISPEECTQKARKGDTVSVHYTGKLEDGTVFDSSVERGQPIQFPLGTGRVIPGWDQGILGMCVGEKRKLTIPPHLAYGKQGAGRVIPPDSTLIFTTELVSIDNDGDRDEL

SEQ ID NO: 4656 - DNA, 408 bp, Saccharomyces cerevisiae
  CDS (1)..(408)
atgatgtttaatatttaccttttcgtcacttttttttccaccattcttgcaggttccctgtcagatttggaaatcggtattatcaagagaataccggtagaagattgcttaattaaggcaatgccaggtgataaagttaaggttcattatacaggatctttattagaatcgggaactgtatttgactcaagttattcaagaggctctcctatcgcttttgaacttggcgttggcagagtaattaaaggttgggatcaaggtgttgccggcatgtgcgttggcgaaaaaagaaagctgcaaattccaagttctttggcctacggagaaagaggtgtcccaggcgtcattcctccaagtgctgatttggtgtttgatgtcgaattggtagacgtgaaatcagccgcctag

SEQ ID NO: 4657 - protein, 135 aa, Saccharomyces cerevisiae
MMFNIYLFVTFFSTILAGSLSDLEIGIIKRIPVEDCLIKAMPGDKVKVHYTGSLLESGTVFDSSYSRGSPIAFELGVGRVIKGWDQGVAGMCVGEKRKLQIPSSLAYGERGVPGVIPPSADLVFDVELVDVKSAA

SEQ ID NO: 4658 - DNA, 345 bp, Ashbya gossypii
  CDS (1)..(345)
atgtcggaggtaatcgaaggtaacgtgaagatcgacagactgtcgccaggcgatggcaagacgttcccgaagaccggggacctggtgacgatccactacaccgggacgctggagaacgagcagaagttcgactcgtcggtggaccggggctcgccgttccagtgcaacatcggcgtggggcaggtgatcaagggctgggacgtggcgatcccgaagctgtcggtgggcgagaaggcgcggctgacgatcccgggcgcgtacgcgtacgggccgcggggcttcccggggctgatcccgcccaacgcgacgctgatcttcgaggtggagctgctaaaggtgaactga

SEQ ID NO: 4659 - protein, 114 aa, Ashbya gossypii
MSEVIEGNVKIDRLSPGDGKTFPKTGDLVTIHYTGTLENEQKFDSSVDRGSPFQCNIGVGQVIKGWDVAIPKLSVGEKARLTIPGAYAYGPRGFPGLIPPNATLIFEVELLKVN

SEQ ID NO: 4660 - DNA, 351 bp, Aspergillus oryzae
  CDS (1)..(351)
atgggtgtcgagaggaagatcattacccgcggtagcggcccctctcctgcctcaggcgacaaggtctccatccactacaccggctggatctacgaccctaagaaggccaacaagggcttccagggcaagcagtttgatagttctagatcgccggggcggggtccattggttgtgaatattggtcaggggaaggttatcaagggttgggatgagggtgtcatgcagatgagcctcggcgagaagtctaccctgactattaccccggactatggctatggtgacaaggccgctggcaagatccctgcaaactctactctgatcttcgaggttgagcttcttaagattaactag

SEQ ID NO: 4661 - protein, 116 aa, Aspergillus oryzae
MGVERKIITRGSGPSPASGDKVSIHYTGWIYDPKKANKGFQGKQFDSSRSPGRGPLVVNIGQGKVIKGWDEGVMQMSLGEKSTLTITPDYGYGDKAAGKIPANSTLIFEVELLKIN

SEQ ID NO: 4662 - DNA, 375 bp, Candida albicans
  CDS (1)..(375): transl_table=12
atgtctgaagaacttccacaaattgaaattgttcaagaaggtgataacaccacatttgctaagccaggtgatacagtaaccattcattatgatggtaaattaactaatggtaaagaatttgattcatcaagaaaaagaggtaaaccatttacttgtactgttggtgttggtcaagttattaaaggttgggatatttctttaactaacaattatggtaaaggtggtgctaatttacctaaaatttcaaagggaactaaagcaattttaactattccaccaaatttggcttatggtccaagaggtatcccaccaattattggtcctaatgaaactcttgttttcgaagttgaattacttggtgttaatggtcaataa

SEQ ID NO: 4663 - protein, 124 aa, Candida albicans
MSEELPQIEIVQEGDNTTFAKPGDTVTIHYDGKLTNGKEFDSSRKRGKPFTCTVGVGQVIKGWDISLTNNYGKGGANLPKISKGTKAILTIPPNLAYGPRGIPPIIGPNETLVFEVELLGVNGQ

SEQ ID NO: 4664 - DNA, 345 bp, Candida glabrata
  CDS (1)..(345)
atgtccgaaacaattgaaggcggtgtcaagatcgacagattgtccccaggtgatggtaagactttcccaaagcaaggtgatctagtgactattcactacactggtactctagagaacggtcaaaaatttgactcctctgtcgaccgtggttctccattccaatgtaacattggtgtaggccaagttatcaagggttgggatgctggtattccaaagttgtccgttggtgaaaaggctagactaaccatcccaggtccatacgcttacggtcctcgtggtttcccaggtttgatcccacctaacgccactttgatcttcgacgtcgaattgttgaaggttaactaa

SEQ ID NO: 4665 - protein, 114 aa, Candida glabrata
MSETIEGGVKIDRLSPGDGKTFPKQGDLVTIHYTGTLENGQKFDSSVDRGSPFQCNIGVGQVIKGWDAGIPKLSVGEKARLTIPGPYAYGPRGFPGLIPPNATLIFDVELLKVN

SEQ ID NO: 4666 - DNA, 405 bp, Cryptococcus neoformans; identical to SEQ ID NO: 4468
  CDS (79)..(405)

SEQ ID NO: 4667 - protein, 108 aa, Cryptococcus neoformans
MGVTVENISAGDGKTFPQPGDSVTIHYVGTLLDGSKFDSSRDRGTPFVCRIGQGQVIRGWDEGVPQLSIGQKANLICTPDYAYGARGFPPVIPPNSTLKFEVELLKIN

SEQ ID NO: 4668 - DNA, 327 bp, Cryptococcus neoformans var. grubii
  CDS (1)..(327)
atgggtgttactgttgagaacatttccgccggtgacggcaagaccttcccccagcctggagacaatgttactatccactacgttggtacccttcttgacggttccaagtttgactcttcccgagaccgtggaacgcccttcgtctgccgaattggccaaggccaagttatcaggggttgggacgagggtgttcctcagctctccgtaggccagaaggctaacctcatctgtacccctgactatgcctacggtgcgcgaggtttcccccctgttattcctcccaactccaccctcaagttcgaggttgagctcctcaaggtcaactaa

SEQ ID NO: 4669 - protein, 108 aa, Cryptococcus neoformans var. grubii
MGVTVENISAGDGKTFPQPGDNVTIHYVGTLLDGSKFDSSRDRGTPFVCRIGQGQVIRGWDEGVPQLSVGQKANLICTPDYAYGARGFPPVIPPNSTLKFEVELLKVN

SEQ ID NO: 4670 - DNA, 339 bp, Debaryomyces hansenii
  CDS (1)..(339): transl_table=12
atgtccgctcctgctactactcaagttgaaattttgcaagaaggtgatggaaagaccttcccaaagccaggtgatttagtcaccattcactacaccggtaccttagaaaacggtaagaagtttgactcttcgcgtgacagaggtaagccattccaatgcacaattggtgttggtcaagtaattgttggatgggacactggtatccctaaattgtcggttggatctcgtgctaagttgtcgattccaggccatgaggcttacggcgacagaggattcccaggtttgattccacctaacgctactttgctcttcgacgttgaattgttgaacgtcaattag

SEQ ID NO: 4671 - protein, 112 aa, Debaryomyces hansenii
MSAPATTQVEILQEGDGKTFPKPGDLVTIHYTGTLENGKKFDSSRDRGKPFQCTIGVGQVIVGWDTGIPKLSVGSRAKLSIPGHEAYGDRGFPGLIPPNATLLFDVELLNVN

SEQ ID NO: 4672 - DNA, 441 bp, Gibberella zeae; identical to SEQ ID NO: 4458
  CDS (106)..(441)

SEQ ID NO: 4673 - protein, 111 aa, Gibberella zeae
MGVEKTIITQGSGPSPQVGQKVTMEYTGWLQKEDGTKGDQFDTSVGRGDFVVNIGVGQVIKGWDEGVTQMKLGEKATLHISPDYGYGPRGFPGAIPPNSTLIFDVELKKIG

SEQ ID NO: 4674 - DNA, 345 bp, Kluyveromyces lactis
  CDS (1)..(345)
atgtccgaaacaattgaaggtaacgttcaaattctaagattatcaccaggtgacagtaccaacttcccaaaaccaggcgatttggtaacaatccattacactggtactttggaaaacggtcaaaagtttgattcttccgttgatagaggttctccattccaatgtaacattggtgtaggtcaagttatcaagggttgggatgctgctattccaaagttgtccgttggtgaaaaggcaagactaactatcccaggcccatacgcttatggtccacgtggtttcccaggtttgatcccaccaaatgctactttagtctttgatgttgaattgttgaagattaactag

SEQ ID NO: 4675 - protein, 114 aa, Kluyveromyces lactis
MSETIEGNVQILRLSPGDSTNFPKPGDLVTIHYTGTLENGQKFDSSVDRGSPFQCNIGVGQVIKGWDAAIPKLSVGEKARLTIPGPYAYGPRGFPGLIPPNATLVFDVELLKIN

SEQ ID NO: 4676 - DNA, 330 bp, Neisseria meningitidis serogroup
  CDS (1)..(330): transl_table=11
atgggcagcctgattattgaagatttgcaggaaggcttcggaaaagaagcagttaaaggcaaagagattaccgtgcattacacaggttggctggaaaacggaaccaaattcgactccagcctcgaccgccgccagccgctgaccatcacgctcggtgtcggacaagtcatcaaaggctgggacgaaggcttcggcggcatgaaggaaggcggcaaacgcaagctgaccatcccttcggaaatgggctacggcgcacgcggcgcgggcggcgtgattcctccgcacgccactttgatatttgaagtcgagctgctgaaagtgtacgaataa

SEQ ID NO: 4677 - protein, 109 aa, Neisseria meningitidis serogroup
MGSLIIEDLQEGFGKEAVKGKEITVHYTGWLENGTKFDSSLDRRQPLTITLGVGQVIKGWDEGFGGMKEGGKRKLTIPSEMGYGARGAGGVIPPHATLIFEVELLKVYE

SEQ ID NO: 4678 - DNA, 339 bp, Schizosaccharomyces pombe
  CDS (1)..(339)
atgggtgtcgaaaagcaagttatttcttccggaaatggtcaagactttcccaaacctggtgacagaatcaccatgcattataccggtactttaaccaatggtaaaaagtttgattcatctgttgaccgtggatccccatttgtttgcactattggcgttggtcaattaattcgcggatgggacgaaggagtacccaaaatgagtttgggtgagaaagctaagcttactatcactcctgattatggctatggcccacgtggtttccctggattgattcctcctaacagcactcttcttttcgatgttgagttgcttgctatcaatgataagaaggcttaa

SEQ ID NO: 4679 - protein, 112 aa, Schizosaccharomyces pombe
MGVEKQVISSGNGQDFPKPGDRITMHYTGTLTNGKKFDSSVDRGSPFVCTIGVGQLIRGWDEGVPKMSLGEKAKLTITPDYGYGPRGFPGLIPPNSTLLFDVELLAINDKKA

SEQ ID NO: 4680 - DNA, 375 bp, Streptomyces chrysomallus
  CDS (1)..(375): transl_table=11
gtgagcatcgagaagcccgaggtcgacttcccgggtggcgagccgccggccgacctggcgatcaaggacatctgggagggcgacggcccggtggcccaggccggccagaccgtctccgtccactacgtgggcgtggccttctccaccggcgaggagttcgacgcctcctggaaccgcggcaccccgctgcagttccagctcggtgccggtcaggtcatctccggctgggaccagggcgtgcagggcatgaaggtcggcggtcgccgtgagctgatcatccccgcgcacctcgcctacggcgaccgcggcgccggcggcggcaagatcgccccgggcgagacgctgatcttcgtctgcgacctcgtcgcggtctga

SEQ ID NO: 4681 - protein, 124 aa, Streptomyces chrysomallus
MSIEKPEVDFPGGEPPADLAIKDIWEGDGPVAQAGQTVSVHYVGVAFSTGEEFDASWNRGTPLQFQLGAGQVISGWDQGVQGMKVGGRRELIIPAHLAYGDRGAGGGKIAPGETLIFVCDLVAV

SEQ ID NO: 4682 - DNA, 327 bp, Yarrowia lipolytica
  CDS (1)..(327)
atgggtgtcacagttaagcagctccagcccggcgacggcaagacctaccccaagaagggagatgccgtcaccatccactacgtgggcactctggagaacggccagaagtttgactcttctcgagatcgaggcgagcccttcaagaccaccattggtgtcggcgatgtcatccgaggatgggacgagggtgtccccaagctctctctcggcgagcgatccgtgctcaccatctccggtgactacggctacggcgagcgaggtttccccggcctcatcccccccaacgccactcttgtctttgacgttgagctcctcggtatcaactaa

SEQ ID NO: 4683 - protein, 108 aa, Yarrowia lipolytica
MGVTVKQLQPGDGKTYPKKGDAVTIHYVGTLENGQKFDSSRDRGEPFKTTIGVGDVIRGWDEGVPKLSLGERSVLTISGDYGYGERGFPGLIPPNATLVFDVELLGIN

SEQ ID NO: 4684 - DNA, 558 bp, Oryza sativa
  CDS (1)..(558)
atgtctgagaccatagatttaaccggagatagatgcattcttaagacagtgatcaggagagcaaaggatgatgctactgcaccttcagatagtcttcccattgttgatgttcactatgaaggaacacttgctgagaacggggaagtgtttgacactactcatgaagacaactccgtcttctcatttgaaattggagagggaactgtcatcaaggcatgggatatcgccgtgaaaacaatgaaggttggagaggttgcaaagatcacatgcaagccagaatatgcttatggagctgcaggttcacctccagagataccgccagatgcaactctcacttttgaggttgagttaatcgcatgcaggccgaggaaaggttctagtgtggaaagtgtatctgaagagaaagctaggcttgaggagttgaagaagcagagggagatcgctgctgcagccaaagaggaagagaagaggaaaagggaggaagcaaaagcagctgcagctgcgcgtgtacaagcaaaacttgaagcaaaaaagggcaagggaaagaaggccaaatag

SEQ ID NO: 4685 - protein, 185 aa, Oryza sativa
MSETIDLTGDRCILKTVIRRAKDDATAPSDSLPIVDVHYEGTLAENGEVFDTTHEDNSVFSFEIGEGTVIKAWDIAVKTMKVGEVAKITCKPEYAYGAAGSPPEIPPDATLTFEVELIACRPRKGSSVESVSEEKARLEELKKQREIAAAAKEEEKRKREEAKAAAAARVQAKLEAKKGKGKKAK

SEQ ID NO: 4686 - DNA, 477 bp, Oryza sativa
  CDS (1)..(477)
atggggaagcgtcagcagcagcggcggctcgtccgcttcgccgtcgccgccgccgtcgttgtcgcggcggccctcatcctgaccgcttcggccaagaagtccggagatgtcacggagcttcagatcggtgtgaagtacaagccagagtcatgcaccctgcaagctcacaaaggagacaaaatcaaagtgcattatcgtgggtcactcactgatggatcagtgtttgattctagctatgacagaggtgacccctttgaatttactcttggaaacggccaagtgataaaaggttgggaccaagggttactaggtatgtgtgtcggtgaaaagaggaagctaaagatacctgcaaagatgggttatggggagagaggctccccaccgaagattccaggtggagcaacactaatctttgacacggagcttatcgccgtcaatggaaagacaaccggtggtgctagcaatagtgagctctaa

SEQ ID NO: 4687 - protein, 158 aa, Oryza sativa
MGKRQQQRRLVRFAVAAAVVVAAALILTASAKKSGDVTELQIGVKYKPESCTLQAHKGDKIKVHYRGSLTDGSVFDSSYDRGDPFEFTLGNGQVIKGWDQGLLGMCVGEKRKLKIPAKMGYGERGSPPKIPGGATLIFDTELIAVNGKTTGGASNSEL

SEQ ID NO: 4688 - DNA, 414 bp, Oryza sativa
  CDS (1)..(414)
atggggaagcgtcagcagcagcggcggctcgtccgcttcgccgtcgccgccgccgtcgttgtcgcggcggccctcatcctgaccgcttcggccaagaagtccggagatgtcacggagcttcagatcggtgtgaaggggtcactcactgatggatcagtgtttgattctagctatgacagaggtgacccctttgaatttactcttggaaacggccaagtgataaaaggttgggaccaagggttactaggtatgtgtgtcggtgaaaagaggaagctaaagatacctgcaaagatgggttatggggagagaggctccccaccgaagattccaggtggagcaacactaatctttgacacggagcttatcgccgtcaatggaaagacaaccggtggtgctagcaatagtgagctctaa

SEQ ID NO: 4689 - protein, 137 aa, Oryza sativa
MGKRQQQRRLVRFAVAAAVVVAAALILTASAKKSGDVTELQIGVKGSLTDGSVFDSSYDRGDPFEFTLGNGQVIKGWDQGLLGMCVGEKRKLKIPAKMGYGERGSPPKIPGGATLIFDTELIAVNGKTTGGASNSEL

SEQ ID NO: 4690 - DNA, 339 bp, Oryza sativa
  CDS (1)..(339)
atgggcttcgagaagacgatcctgaaagccggcaccggtcccaagcccgtcaagggccagaaggtcaccgtccactgcaccggcttcgggaaagataatgatctcgctaagaagttttggagcacaaaggacgcaggccaggagccattcagtttcaatataggccagggttcggtgatcaaaggatgggacgagggagttatgaccatgcaagtgggtgaagttgctcgtattcagtgcaccccggattatgcgtatggagctagtgggtttccggcctggggaattcgaccaaactcagtgctggtgttcgagattgaggttcttagcgcccagtaa

SEQ ID NO: 4691 - protein, 112 aa, Oryza sativa
MGFEKTILKAGTGPKPVKGQKVTVHCTGFGKDNDLAKKFWSTKDAGQEPFSFNIGQGSVIKGWDEGVMTMQVGEVARIQCTPDYAYGASGFPAWGIRPNSVLVFEIEVLSAQ

SEQ ID NO: 4692 - DNA, 561 bp, Oryza sativa
  CDS (1)..(561)
atggcagaggttgcagatttaactggggatggaggtgttcttaagacggtggtcagaaaagcaaaggatgatgctatagctccaactgatagtcttcccttggttgatgttcattatgaaggcacactcgctgaaaatggtgaagttttcgacaccactcatgaagacaactctattttctcatttgaaattgggcaaggagctgtcattaaagcatgggatatagctttaagaactatgaaggttggtgaagttgcaaaaataacatgcaagccagaatacgcatacggaagtgcagggtcgccgccagagattccacccaatgcaacactcatttttgaggtggagttagtggcttgtaggcctaggaaaggttcaagcctgggcagtgtttctgatgagaaagccaggctagaggaactaaagaagcagcgagagctagctgctgccaccaaggaggaagagaaaaagaagagggaagaagcgaaggctgctgcagcagctcgtgtccaagccaaacttgacgcgaagaaggggaagggaaaaggaaagggaaaatag

SEQ ID NO: 4693 - protein, 186 aa, Oryza sativa
MAEVADLTGDGGVLKTVVRKAKDDAIAPTDSLPLVDVHYEGTLAENGEVFDTTHEDNSIFSFEIGQGAVIKAWDIALRTMKVGEVAKITCKPEYAYGSAGSPPEIPPNATLIFEVELVACRPRKGSSLGSVSDEKARLEELKKQRELAAATKEEEKKKREEAKAAAAARVQAKLDAKKGKGKGKGK

SEQ ID NO: 4694 - DNA, 420 bp, Oryza sativa
  CDS (1)..(420)
atggcagaggttgcagatttaactggggatggaggtgttcttaagacggtggtcagaaaagcaaaggatgatgctatagctccaactgatagtcttcccttggttgatgttcattatgaaggcacactcgctgaaaatggtgaagttttcgacaccactcatgaagacaactctattttctcatttgaaattgggcaaggagctgtcattaaagcatgggatatagctttaagaactatgaaggttggtgaagttgcaaaaataacatgcaagccagaatacgcatacggaagtgcagggtcgccgccagagattccacccaatgcaacactcatttttgaggtggagttagtggcttgtaggcctaggaaaggttcaagcctgggcagtgtttctgatgagaaagccaggctagagtaa

SEQ ID NO: 4695 - protein, 139 aa, Oryza sativa
MAEVADLTGDGGVLKTVVRKAKDDAIAPTDSLPLVDVHYEGTLAENGEVFDTTHEDNSIFSFEIGQGAVIKAWDIALRTMKVGEVAKITCKPEYAYGSAGSPPEIPPNATLIFEVELVACRPRKGSSLGSVSDEKARLE

SEQ ID NO: 4696 - DNA, 417 bp, Oryza sativa
  CDS (1)..(417)
atggcagaggttgcagatttaactggggatggaggtgttcttaagacggtggtcagaaaagcaaaggatgatgctatagctccaactgatagtcttcccttggttgatgttcattatgaaggcacactcgctgaaaatggtgaagttttcgacaccactcatgaagacaactctattttctcatttgaaattgggcaaggagctgtcattaaagcatgggatatagctttaagaactatgaaggttggtgaagttgcaaaaataacatgcaagccagaatacgcatacggaagtgcagggtcgccgccagagattccacccaagtctgttgctatttctcctatgcgatgcaaatttgagttcctggtgtctataattgaatcagctttgtctttgcagtgcaacactcatttttga

SEQ ID NO: 4697 - protein, 138 aa, Oryza sativa
MAEVADLTGDGGVLKTVVRKAKDDAIAPTDSLPLVDVHYEGTLAENGEVFDTTHEDNSIFSFEIGQGAVIKAWDIALRTMKVGEVAKITCKPEYAYGSAGSPPEIPPKSVAISPMRCKFEFLVSIIESALSLQCNTHF

SEQ ID NO: 4698 - DNA, 657 bp, Oryza sativa
  CDS (1)..(657)
atggctccctccgccgccgccgccgccgccgccgccgccgccgccgccaccgcctcgccgctgtcccgtctcctgctcagcctcccaaaccccagcgtgaaacttcccgtgtcttctccgagccggaacgccggcgccgccgtggccgccaagaacagcacccccgtcgtcgccctccgccggcgcgaggccgtggccgccgtgctgtccgcatccatcctctcccgcgtgctccccgcggcggcggaagcgtccggcggcgagtgcccgctcgaggtggcgcccaacggtctcgccttctgcgaccgcgttgtcggcaccggcgccgccgccgagcaagggcagctcatcaaggcgcattacaccgggaggctggaggacggcacggtgttcgacagcagctacaagcgcgggaagccgctcaccttccgcgtcggcgtcggcgaggtgatcaaaggatgggaccagggcatagtgggcggcgaagggatcccgccgatgctcgccggtggaaagaggtcgctgaggctgccgccggagctggcctacggcgcgagaggagccgggtgcagaggctgggagcccacctcctgcgtcatcccgcccaactccactctcctcttcgacgtcgagtacgtcggcagagcagtcggatga

SEQ ID NO: 4699 - protein, 218 aa, Oryza sativa
MAPSAAAAAAAAAAAATASPLSRLLLSLPNPSVKLPVSSPSRNAGAAVAAKNSTPVVALRRREAVAAVLSASILSRVLPAAAEASGGECPLEVAPNGLAFCDRVVGTGAAAEQGQLIKAHYTGRLEDGTVFDSSYKRGKPLTFRVGVGEVIKGWDQGIVGGEGIPPMLAGGKRSLRLPPELAYGARGAGCRGWEPTSCVIPPNSTLLFDVEYVGRAVG

SEQ ID NO: 4700 - DNA, 465 bp, Oryza sativa
  CDS (1)..(465)
atggcgaagccgcagcttcttctggtcgtcgccgccgccgcactgctactcgtcgttgcagcctccgccaagaaatccggcgacgtgacggagctccagatcggcgtcaagcacaagccagaatcctgcagcattcaagctcacaaaggcgacagagttaaagttcactaccgtggaaaacttactgatggaacagattttgattctagctatgaaagaggtgacccaatcgaatttgagttgggcactggccaagtgatcaaagggtgggatcagggcattctgggcatgtgcgttggcgagaagaggaagctgaagatcccttcaaagctcggttatggtgctcaagggtcaccgccgaccatccctggtggagcgactctcattttcgataccgagcttgttgctgtcaatggcgagccagccagcaaatccgatgaggacgatgatgacagcgagctttag

SEQ ID NO: 4701 - protein, 154 aa, Oryza sativa
MAKPQLLLVVAAAALLLVVAASAKKSGDVTELQIGVKHKPESCSIQAHKGDRVKVHYRGKLTDGTDFDSSYERGDPIEFELGTGQVIKGWDQGILGMCVGEKRKLKIPSKLGYGAQGSPPTIPGGATLIFDTELVAVNGEPASKSDEDDDDSEL

SEQ ID NO: 4702 - DNA, 465 bp, Brassica napus
  CDS (1)..(465)
atgaggagctctgcatcatccgccatgaaagctgctggagttttggttctccttgccgtcttaacatcagtttatgcgaagaagtcaggtgatgtgacagagttgcagattggtgttaagttcaagccgaagacatgtgatgttcaggctcacaaaggggacaagatcaaggtccactatcgaggaaagttaacagatggaactgtgtttgattcaagttttgagagaggtgatccttttgagtttgagcttgggagtggtcaagtcattccaggatgggaccagggtctacttggagcttgtgtaggtgagaagagaaagctcaaaatcccgtccaagcttggttatggtgacaacggctcaccaccgaaaatccccggtggggcgacattgatattcgacaccgagctagttgctgtgaacgggaaaccatccggcgatgcaaaaacgaagaatgagctttga

SEQ ID NO: 4703 - protein, 154 aa, Brassica napus
MRSSASSAMKAAGVLVLLAVLTSVYAKKSGDVTELQIGVKFKPKTCDVQAHKGDKIKVHYRGKLTDGTVFDSSFERGDPFEFELGSGQVIPGWDQGLLGACVGEKRKLKIPSKLGYGDNGSPPKIPGGATLIFDTELVAVNGKPSGDAKTKNEL

SEQ ID NO: 4704 - DNA, 492 bp, Brassica napus
  CDS (1)..(492)
atgtgtctccgttactccatttgcttgatcttattctctctcatttcacttcaagcttttgccaagaagacaggagatgtgtctgaattgcagatcggtgttaagtttaagccagcaacgtgtgaagtgaaggctcacaaaggtgatatgatcaaggtgcactacagggggaaacttactgatggaacagtattcgattcgagctttgaaagggatgaaccgttcgagtttgagttaggaagtggtcaggttatcaaaggttgggatcaaggtttgctaggtgcgtgtgtaggggagaagaggaagttaaagatacctgctaaacttggatatggtgaacaaggctctcctcctactatcccaggtggggcaacactgatatttgacacagagcttcttgcggtaaatgaaaaaccagctggtggagaagaacaccaagaagaagatgacggagaagatgtagacgacacatatggagctgacgagctgtga

SEQ ID NO: 4705 - protein, 163 aa, Brassica napus
MCLRYSICLILFSLISLQAFAKKTGDVSELQIGVKFKPATCEVKAHKGDMIKVHYRGKLTDGTVFDSSFERDEPFEFELGSGQVIKGWDQGLLGACVGEKRKLKIPAKLGYGEQGSPPTIPGGATLIFDTELLAVNEKPAGGEEHQEEDDGEDVDDTYGADEL

SEQ ID NO: 4706 - DNA, 567 bp, Triticum aestivum
  CDS (1)..(567)
atggggacgaagaagccgcagctcctccgcctcgccgtcgtcgccgtcgccgtcgcggccgtccttctgaccgcttcggccaagaagtccgcggatgttacacagctccagatcggcgtcaagtacaagcctgaatcatgtaccctacaagctcacaaaggcgacaagattaaagtgcattatcatgggacactcactgatggatcagtatttgactctagctatgacagaggtgatcccttcgaattcactcttgggaatgggcaggtgataaaaggttgggaccaaggtttactaggtatgtgcgtcggcgaaaagcggaagctaaggatacccgcaaagatgggttacggggagcgaggctccccaccaaagattccaggtggtgcgactctggttttcgacacggagctcatcgccgtgaatgggaggacgtctgctggcgctgccgcggagagcgacgacagcgagctttgctacatacatggatgtagttttgcttgcatttctgcgagtccttcggctaaaagggccgccgttttcgaacgattccatcatcatgtttaa

SEQ ID NO: 4707 - protein, 188 aa, Triticum aestivum
MGTKKPQLLRLAVVAVAVAAVLLTASAKKSADVTQLQIGVKYKPESCTLQAHKGDKIKVHYHGTLTDGSVFDSSYDRGDPFEFTLGNGQVIKGWDQGLLGMCVGEKRKLRIPAKMGYGERGSPPKIPGGATLVFDTELIAVNGRTSAGAAAESDDSELCYIHGCSFACISASPSAKRAAVFERFHHHV

SEQ ID NO: 4708 - DNA, 561 bp, Triticum aestivum
  CDS (1)..(561)
atggcagaaaccattgatctaacaggggatggaggcgttcttaagacggtggtcagaaaagcaaaagatgatgctataagcccatctgacagccttccattggttgatgttcattatgaagggacacttgctgaaaatggcgaagtttttgacaccacacatgaagacaattctatttttacatttgaagttggccagggagctgtcattaaagcatgggacatagccttaagaactatgaaagttggcgagattgcaaaaataacatgcaggccggaatatgcgtatggaagtccaggctcgccaccagagataccagccaatgcaacactcatttttgaggtggaattagtggcttgcaagccaaggaaaggttcaagtctgggcagtgtatctgatgagaaagccaggctagaggagcttaagaaacagcgggagctggcagctgccaccaaagaggaagagaagaagaagagggaggaggcaaaggccgcggcagcggctcgtgtgcaagccaaacttgacgccaagaagggcaagggaaaaggaaagggcaaatag

SEQ ID NO: 4709 - protein, 186 aa, Triticum aestivum
MAETIDLTGDGGVLKTVVRKAKDDAISPSDSLPLVDVHYEGTLAENGEVFDTTHEDNSIFTFEVGQGAVIKAWDIALRTMKVGEIAKITCRPEYAYGSPGSPPEIPANATLIFEVELVACKPRKGSSLGSVSDEKARLEELKKQRELAAATKEEEKKKREEAKAAAAARVQAKLDAKKGKGKGKGK

SEQ ID NO: 4710 - DNA, 339 bp, Zea mays
  CDS (1)..(339)
atgggcttcgagaagcagatcctgagatccggcaccggccccaagccgataaagggccagaaggtcaccgttcactgcaccggctacgggaaggatcgtgatctgtccaagaaattttggagcaccaaggaccctgggcagcagccattcagtttcagcattggtcagggttcagtgatcaaaggatgggacgagggagttatgaccatgcaagtgggtgaagttgctcgtatccagtgcacgcctgattatgcttatggagccggcgggttcccagcctggggaattcaaccaaactcagtgcttgtgttcgagattgaagtcctcagtgcccagtaa

SEQ ID NO: 4711 - protein, 112 aa, Zea mays
MGFEKQILRSGTGPKPIKGQKVTVHCTGYGKDRDLSKKFWSTKDPGQQPFSFSIGQGSVIKGWDEGVMTMQVGEVARIQCTPDYAYGAGGFPAWGIQPNSVLVFEIEVLSAQ

SEQ ID NO: 4712 - DNA, 462 bp, Linum usitatissimum
  CDS (1)..(462)
atgaatcagagctctgtatcgaaagctgcggcgatcttcttcttgctggccatgtcttcattagtttcggcgaagaagtcgaaggatgtgacagagctacagatcggcgtcaagtacaaacccgaatcttgtgaaattcaggctcataagggagacaggatcaaagtacactaccggggaatgctaactgatggcacagttttcgactcgagctttgaaaggggtgacccttttgagtttgagcttggtggtggtcaagttatcaaaggatgggaccagggactgctgggaacttgtgtaggcgagaagcggaagttgaaaatcccttcgaaactcggttatggtgacagaggttctcccccgaaaatcccaggtggagcaacgttgatattcgacaccgagcttatagcagtgaacgggaagacaaacagtggagagactgctgctgatagtgagttgtag

SEQ ID NO: 4713 - protein, 153 aa, Linum usitatissimum
MNQSSVSKAAAIFFLLAMSSLVSAKKSKDVTELQIGVKYKPESCEIQAHKGDRIKVHYRGMLTDGTVFDSSFERGDPFEFELGGGQVIKGWDQGLLGTCVGEKRKLKIPSKLGYGDRGSPPKIPGGATLIFDTELIAVNGKTNSGETAADSEL

SEQ ID NO: 4714 - DNA, 465 bp, Hordeum vulgare
  CDS (1)..(465)
atggcgaagccggggcttcttctctgcctgctggtcgtggccgccgcgctcctgctcgtcgcctccgccaagaagtccggcgacgtgtcggcactccagatcggcgtcaagtacaagccagaatcgtgcagcatctcggctcacaaaggagacagagttaaagttcactaccgtggaacacttaccgatggaacagtttttgattctagctatgaaaggggtgacccaattgaatttgaattgggcactggtcaagtgatcaaaggatgggatcagggaattttgggcatgtgcattggtgagaagaggaagctgaagatcccttcaaagctcggctacggggatcagggatcaccacctaccattccaggcggagcaactctcatattcgacacagagcttgtcgcagtcaatggcgagccttctagcaaatcagacgaggatgtcgctgatagtgatctgtag

SEQ ID NO: 4715 - protein, 154 aa, Hordeum vulgare
MAKPGLLLCLLVVAAALLLVASAKKSGDVSALQIGVKYKPESCSISAHKGDRVKVHYRGTLTDGTVFDSSYERGDPIEFELGTGQVIKGWDQGILGMCIGEKRKLKIPSKLGYGDQGSPPTIPGGATLIFDTELVAVNGEPSSKSDEDVADSDL

SEQ ID NO: 4716 - DNA, 561 bp, Hordeum vulgare
  CDS (1)..(561)
atggcagaaaccatagatttaacaggggatggaggcgtccttaagacggtggttagaaaagcaaaggatgatgctataagcccatctgacagccttccattagttgatgttcattatgaagggacacttgctgaaaatggggaagtttttgacaccacacatgaagacaattctattttttcatttgaagttggccagggagctgtcattaaagcatgggatctagccttaagaactatgaaagttggtgaggttgcaaaaataacatgcaagccagaatatgcctatggaagtgcaggctccccaccagagataccagcgaatgcgacactcatttttgaggtggaattagtggcgtgcaagccaaggaaaggttcaagtctgggcagtgtatctgatgagaaagccaggctagaggagcttaagaaacagcgggagctagctgccgctaccaaagaggaagagaagaagaagagggaggaggcaaaggctgcagcggcggcccgtgtgcaagccaaacttgacgcgaagaagggcaagggaaaaggaaagggcaaataa

SEQ ID NO: 4717 - protein, 186 aa, Hordeum vulgare
MAETIDLTGDGGVLKTVVRKAKDDAISPSDSLPLVDVHYEGTLAENGEVFDTTHEDNSIFSFEVGQGAVIKAWDLALRTMKVGEVAKITCKPEYAYGSAGSPPEIPANATLIFEVELVACKPRKGSSLGSVSDEKARLEELKKQRELAAATKEEEKKKREEAKAAAAARVQAKLDAKKGKGKGKGK

SEQ ID NO: 4718 - DNA, 564 bp, Helianthus annuus
  CDS (1)..(564)
atggctgaagcaattgatttgactggagatggaggtgtcttgaagacgattgtaaagagcgctaaacctgatgcgattgctccttcagagagccttcctcttgttgatgtgcattacgaagggagtctggctgaaacaggtgaagtttttgatactacacatgaagacaatacaatattcacctttgaaattggcaaaggctctgtgatcaaggcatgggatgttgctctgagaacaatgaaggttggggaggttgccaaaataacttgcaagtcagattatgcctatggtagtgctggctctccgccagagattccaccagatgcaactctgatctttgaggtggagctagtggcttgcaggccaagaaaaggttctagcgtggctagtgcctcagatgagcgggctagactagatgagctgaagaagcaaagggaaatggctgccgcacagaaggaagaagagaaaaagaagcgtgaagaagcaaaggcagcggctgctgctcgtattcaagccaagatggaagctaagaaaggcggcaagggaaaggggaaaggaaagtag

SEQ ID NO: 4719 - protein, 187 aa, Helianthus annuus
MAEAIDLTGDGGVLKTIVKSAKPDAIAPSESLPLVDVHYEGSLAETGEVFDTTHEDNTIFTFEIGKGSVIKAWDVALRTMKVGEVAKITCKSDYAYGSAGSPPEIPPDATLIFEVELVACRPRKGSSVASASDERARLDELKKQREMAAAQKEEEKKKREEAKAAAAARIQAKMEAKKGGKGKGKGK

SEQ ID NO: 4720 - DNA, 486 bp, Brassica napus
  CDS (1)..(486)
atgttggcgaagagcaagatgtgtctcctccgttactactcccttttcttgatcgtcttctctctcatttccctcgaaggtttcgccaagaagacgggagatgtgtctgaattgcagatcggagttaagtttaagccaaaaacgtgtgaatttaaagctcacaagggtgataggatcaaggtgcactacagggggaaacttactgatggaactgtatttgattcgagcttcgaaaggggtgatccgttcgagtttgaactaggaagtggtcaggttatcaaaggttgggatcaaggattgctaggtgcgtgtgtaggagagaagaggaagttaaagatacctgctaaacttggatatggtgaacaaggctctcctcctactatccccggtggtgcaacactgatttttgatactgagcttattgcggtgaatggaaaaccaactgttggagaagaagaagatgaagatgaagatgacgagctgtaa

SEQ ID NO: 4721 - protein, 161 aa, Brassica napus
MLAKSKMCLLRYYSLFLIVFSLISLEGFAKKTGDVSELQIGVKFKPKTCEFKAHKGDRIKVHYRGKLTDGTVFDSSFERGDPFEFELGSGQVIKGWDQGLLGACVGEKRKLKIPAKLGYGEQGSPPTIPGGATLIFDTELIAVNGKPTVGEEEDEDEDDEL

SEQ ID NO: 4722 - DNA, 465 bp, Brassica napus
  CDS (1)..(465)
atgaggagctctgcatcatccgccatgaaagctgctggagttttggttctccttgccgtcttaacatcagtttatgcgaagaagtcaggtgatgtgacagagttgcagattggtgttaagttcaagccgaagacatgtgatgttcaggctcacaaaggggacaagatcaaggtccactatcgaggaaagttaacagatggaactgtgtttgattcaagttttgagagaggtgatcctattgagtttgagcttgggagtggtcaagtcattccaggatgggaccagggtctacttggagcttgtgtaggtgagaagagaaagctcaaaatcccgtccaagcttggttatggtgacaacggctcaccaccgaaaatccccggtggggcgacattgatattcgacaccgagctagttgctgtgaacgggaaaccatccggcgatgcaaaaacgaagaatgagctttga

SEQ ID NO: 4723 - protein, 154 aa, Brassica napus
MRSSASSAMKAAGVLVLLAVLTSVYAKKSGDVTELQIGVKFKPKTCDVQAHKGDKIKVHYRGKLTDGTVFDSSFERGDPIEFELGSGQVIPGWDQGLLGACVGEKRKLKIPSKLGYGDNGSPPKIPGGATLIFDTELVAVNGKPSGDAKTKNEL

SEQ ID NO: 4724 - DNA, 465 bp, Brassica napus
  CDS (1)..(465)
atgaggagctctgcatcatccgccatgaaagctgctggagttttggttctgcttgccgtcttaacatcagtttatgcgaagaagtcaggtgatgtgacagagttgcagattggtgttaagttcaagcctaagacatgtgatgctcaggctcacaaaggggacaagatcaaggtccattatcgaggaaagttaacagatggaactgtgtttgattcaagttttgagagaggtgaccctattgagtttgagcttgggagtggtcaagtcattccaggatgggaccagggtctacttggagcttgtgtaggtgagaagagaaagctcaaaatcccttccaaacttggttatggggacaacggctcaccaccgaaaattcctggtggggctacattgatattcgacaccgagctagttgctgtgaacgggaaaccatccagcgaaggaaagacaaagaatgagctttga

SEQ ID NO: 4725 - protein, 154 aa, Brassica napus
MRSSASSAMKAAGVLVLLAVLTSVYAKKSGDVTELQIGVKFKPKTCDAQAHKGDKIKVHYRGKLTDGTVFDSSFERGDPIEFELGSGQVIPGWDQGLLGACVGEKRKLKIPSKLGYGDNGSPPKIPGGATLIFDTELVAVNGKPSSEGKTKNEL

SEQ ID NO: 4726 - DNA, 624 bp, Brassica napus
  CDS (1)..(624)
atgagctccttaggattttctgttgggacttgttctccaccaagtgagcaaagaaaatgcagaagttttgtgagcagcagcttaaccaaagcagaggctattaacttgagaagccagcaaaaagtctctgatcatgagttaagttttgttcaaccagcttcttgtggtagaagagaagcaattattggttttggtttctgtattggtcttgttgataaagtttcagcatttgccgaaacaagttcttgtgaattctctgtttctccttctggtcttgccttctgcgataaggtagttggatatggccctgcagctgttaaagggcagctaatcaaggcacattatgttgggaagttggagaatgggaaagtgtttgatagtagctataatcggggaaagcctctaactttccgaataggtgttggtgaggtgattaaaggttgggaccagggaatcattggctctgatggagttcctgctatgcttactggagggaaacggacattaaagattcctcccgaactcgcgtatggtgatcgaggcgcaggttgcaaaggaggctcatgtctcattccaccagcttcggttcttctctttgacattgagttcataggtaaagcttga

SEQ ID NO: 4727 - protein, 207 aa, Brassica napus
MSSLGFSVGTCSPPSEQRKCRSFVSSSLTKAEAINLRSQQKVSDHELSFVQPASCGRREAIIGFGFCIGLVDKVSAFAETSSCEFSVSPSGLAFCDKVVGYGPAAVKGQLIKAHYVGKLENGKVFDSSYNRGKPLTFRIGVGEVIKGWDQGIIGSDGVPAMLTGGKRTLKIPPELAYGDRGAGCKGGSCLIPPASVLLFDIEFIGKA

SEQ ID NO: 4728 - DNA, 492 bp, Brassica napus
  CDS (1)..(492)
atgttggcgaagagcaagatgtgtctcctccgttactcccttttcttgatcgtcttctctctcatttccctccaaggtttcgccaagaagacgggagatgtgtctgaattgcagatcggagttaagtttaagccaaaaacgtgtgaatttaaagctcacaagggtgataggatcaaggtgcactacagggggaaacttactgatggaactgtatttgattcgagctttgaaaggggtgatccgttcgagtttgaactaggaagtggtcaggttatcaaaggttgggatcaaggattgctaggtgcgtgtgtaggagagaagaggaagttaaagatacctgctaaacttggatatggtgaacaaggctctcctcctactatccccggtggtgcaacactgatttttgatactgagcttattgcggtgaatggaaaaccaactgttggagaagaagaagatgaagatgacacatctggagatgacgagctgtaa

SEQ ID NO: 4729 - protein, 163 aa, Brassica napus
MLAKSKMCLLRYSLFLIVFSLISLQGFAKKTGDVSELQIGVKFKPKTCEFKAHKGDRIKVHYRGKLTDGTVFDSSFERGDPFEFELGSGQVIKGWDQGLLGACVGEKRKLKIPAKLGYGEQGSPPTIPGGATLIFDTELIAVNGKPTVGEEEDEDDTSGDDEL

SEQ ID NO: 4730 - DNA, 573 bp, Brassica napus
  CDS (1)..(573)
atgggggatgagattgatttgagtggagatggaggggtcttgaaacagattgtaaggagagccaaacctgatgctattgcaccttctgatgattttcctgtcgttgatgttcactatgagggtgtattggctgaagatggaaaggtctttgacactacacgcgaagacaatctggttttctcctttgagttgggttcaggcagtgttatcaggtcgtgggacattgcacttaagaccatgaaggttggggaagttgcaaaactcacatgtaagccagagtatgcttacggaagtggtggatctcctcccgacatcccacccaatgcaactttgattttcgaagtggaattggttgcttgtagaccgaggaaaggtgctagtgttggaagtgtttctgaggacagagccaggctagaagatctgaagaagcagagagaaattgctgcagctgctaaggaggatgataagaagaagagagaagaagcaaaagctgctgcagctgctaggattcaagctaagctagacgctaagaagggtcaaggcaagggaaaaggcaaaggcaaatctaaatga

SEQ ID NO: 4731 - protein, 190 aa, Brassica napus
MGDEIDLSGDGGVLKQIVRRAKPDAIAPSDDFPVVDVHYEGVLAEDGKVFDTTREDNLVFSFELGSGSVIRSWDIALKTMKVGEVAKLTCKPEYAYGSGGSPPDIPPNATLIFEVELVACRPRKGASVGSVSEDRARLEDLKKQREIAAAAKEDDKKKREEAKAAAAARIQAKLDAKKGQGKGKGKGKSK

SEQ ID NO: 4732 - DNA, 339 bp, Brassica napus
  CDS (1)..(339)
atgggtgtggagaagcaagtcatcagacccggcactggtgccaaacccgctccgggccaaaccgtcaccgtccactgcaccggattcgggaaaggtggtgatctatcccagcagttttggagtacaaaggacgctgggcaaaaacctttctccttccagatcggtaaaggtgctgtgatcaaaggatgggatgaaggcgttatgggaatgcaaattggagaggtcgctcgcttgcggtgctcaccggattatgcatatggtcctggtggatttccggcgtggggaatccagccaaactcggttctcgactttgaaatcgaagtactcagcgttcagtaa

SEQ ID NO: 4733 - protein, 112 aa, Brassica napus
MGVEKQVIRPGTGAKPAPGQTVTVHCTGFGKGGDLSQQFWSTKDAGQKPFSFQIGKGAVIKGWDEGVMGMQIGEVARLRCSPDYAYGPGGFPAWGIQPNSVLDFEIEVLSVQ

SEQ ID NO: 4734 - DNA, 573 bp, Brassica napus
  CDS (1)..(573)
atgggggatgagattgatttgagtggagatggaggcgtcttgaaacagattgtaaggagagctaaacctgatgctattgcaccttctgatgattttcctgtcgttgatgttcactatgagggtatattggctgaagatggaaaggtctttgatactacacgcgaagacaatctggttttctcctttgagttgggttcaggcagtgttatcaggtcgtgggacattgcacttaagaccatgaaggttggggaagttgcaaaactcacatgtaagccagagtatgcttacggaagtggtggatctcctcccgacatcccacctgatgctactttgattttcgaagtggaattggttgcttgtagaccgaggaaaggtgctagtgttggaagtgtttctgaggatagagccaggctagaagatctgaagaagcagagagagattgctgcagctgccaaggaggatgataagaagaagagagaagaagcaaaagctgctgcagctactaggattcaagctaagctagacgctaagaagggtcaaggcaagggaaaaggcaaaggcaaatctaaatga

SEQ ID NO: 4735 - protein, 190 aa, Brassica napus
MGDEIDLSGDGGVLKQIVRRAKPDAIAPSDDFPVVDVHYEGILAEDGKVFDTTREDNLVFSFELGSGSVIRSWDIALKTMKVGEVAKLTCKPEYAYGSGGSPPDIPPDATLIFEVELVACRPRKGASVGSVSEDRARLEDLKKQREIAAAAKEDDKKKREEAKAAAATRIQAKLDAKKGQGKGKGKGKSK

SEQ ID NO: 4736 - DNA, 339 bp, Glycine max
  CDS (1)..(339)
atgggagtggagaagcagttgttgaggtctggcaccggtccgaagccaattcccggtcagaacgtaaccgttcactgcactggtttcgggaagaacggtgacctttctcagaaattctggagcacaaaggatcctggccagaacccattcactttcaaaatcggccaaggttctgttatcaaaggatgggatgaaggtgtgcttggcatgcaaattggtgaagttgctcgtctccggtgctctccggattatgcttatggtgctggtggctttccttcttggggaatacagcccaactctgtcttggaatttgaaatcgaagtcttaagtgcgcaatga

SEQ ID NO: 4737 - protein, 112 aa, Glycine max
MGVEKQLLRSGTGPKPIPGQNVTVHCTGFGKNGDLSQKFWSTKDPGQNPFTFKIGQGSVIKGWDEGVLGMQIGEVARLRCSPDYAYGAGGFPSWGIQPNSVLEFEIEVLSAQ

SEQ ID NO: 4738 - DNA, 465 bp, Glycine max
  CDS (1)..(465)
atgagtttccgtcattccatcatgaacgctcttcccattctcctcttcttcctcttcgtttctgcattagtttctgcgaagaaaactggtgatgtgacggagctgcaaattggcgtgaagcataaaccagtatcatgtgaagttcaggcacacaaaggtgacagagtcaaagtacactataggggaaaactcactgatggaactgttttcgattctagctttgaaagaaataatccaattgaatttgagcttggtactggtcaagtgatcaaaggttgggaccagggattattgggaatgtgtcttggtgagaagcgtaagctgaaaataccatcaaaacttggctatggagagcagggttccccacccactattccaggtggtgcaacactcatatttgacactgagcttgtgggagtgaacgacaaaagtttaggcgaaggaaaaggaaaccacgaaccgtag

SEQ ID NO: 4739 - protein, 154 aa, Glycine max
MSFRHSIMNALPILLFFLFVSALVSAKKTGDVTELQIGVKHKPVSCEVQAHKGDRVKVHYRGKLTDGTVFDSSFERNNPIEFELGTGQVIKGWDQGLLGMCLGEKRKLKIPSKLGYGEQGSPPTIPGGATLIFDTELVGVNDKSLGEGKGNHEP

SEQ ID NO: 4740 - DNA, 339 bp, Hordeum vulgare
  CDS (1)..(339)
atgggaatccagaaggagatcctgagagccggcaccggccccaagcccgtcaagggccagaaggtcaccgtccactgcaccggctacggcaaggacggtgatctgtccaagaagttttggagtaccaaggatcctgggcagcagccattcgctttcaacattggcctgggttcagtgatcaaaggatgggatgagggagttatggacatgcaattgggtgaagtcgcccgtcttaagtgcaccccagactacgcttatggatctggtggctctccagcctggggaattcaaccaaactccgagctgatattcgagatcgaagttcttagcgccaagtga

SEQ ID NO: 4741 - protein, 112 aa, Hordeum vulgare
MGIQKEILRAGTGPKPVKGQKVTVHCTGYGKDGDLSKKFWSTKDPGQQPFAFNIGLGSVIKGWDEGVMDMQLGEVARLKCTPDYAYGSGGSPAWGIQPNSELIFEIEVLSAK

SEQ ID NO: 4742 - DNA, 339 bp, Linum usitatissimum
  CDS (1)..(339)
atgggagtagagaaggagatcgtcagcccgggaaacggtcccaaaccctctcgcggacagaaagtcaccgttcattgcaccggctttgggaaaaacggcgatctatctgaaaagttctggagcaccaaggaccctgggcagcaacctttctctttcaatattggcaagggaagcgtcattaaaggatgggatgaaggtgtcatgggaatgcaagtgggagaagtcgctcgtttacggtgctccccagactacgcttatggagctaatggatttggagcatggggaatcttgcccaattcgactctggtttttgaaattgaagtcctgagcttagagtaa

SEQ ID NO: 4743 - protein, 112 aa, Linum usitatissimum
MGVEKEIVSPGNGPKPSRGQKVTVHCTGFGKNGDLSEKFWSTKDPGQQPFSFNIGKGSVIKGWDEGVMGMQVGEVARLRCSPDYAYGANGFGAWGILPNSTLVFEIEVLSLE

SEQ ID NO: 4744 - DNA, 675 bp, Brassica napus
  CDS (1)..(675)
atggcgatttctactttaacactcacatcatctcactacacgcgttcctttagacccaccatctcttcttcttcttcgtcgtcatcgtcattctcatgtctctgttcttcttcttcttcttccaccgattgccagcagaaacagaggagcttcaccgccgcgaagacgaatgttttcggagtgggtttaggccttttagctgccacgattctctctataacgcctctggacgcagacgccacgaggattgagtactacgccactgttggagaccctctctgcgaatacagctacgcaaaatcagggcttggattctgcgatatcgcagttgggttcggtgataaagccccacgtggcgtactcgtcaatgtccattacacggctaggtttgcagatggaacgttgtttgacagtacatataagcgtgcaagaccacttactatgcggattggagtgggcaaggttataaggggtctcgaccaggggattcttggaggcgaaggagtacctcctatgcgagtaggaggaaagcgtaaacttcagattccacctaagctagcttatggaccagagcctgcaggatgcttttctggtgactgtaacatacctggcaatgcaactttgctatatgatatcaattttgttgagatctaccctggaagtaacacaagatga

SEQ ID NO: 4745 - protein, 224 aa, Brassica napus
MAISTLTLTSSHYTRSFRPTISSSSSSSSSFSCLCSSSSSSTDCQQKQRSFTAAKTNVFGVGLGLLAATILSITPLDADATRIEYYATVGDPLCEYSYAKSGLGFCDIAVGFGDKAPRGVLVNVHYTARFADGTLFDSTYKRARPLTMRIGVGKVIRGLDQGILGGEGVPPMRVGGKRKLQIPPKLAYGPEPAGCFSGDCNIPGNATLLYDINFVEIYPGSNTR

SEQ ID NO: 4746 - DNA, 471 bp, Triticum aestivum
  CDS (1)..(471)
atggggacgaagaagccgtggctcctctgcctcgccgtcgttgccatcgcggccgtccttctgaccgcttcggccaagaagtccgcggatgttacacagctccagatcggcgtcaagtacaagcctgaatcatgtaccctacaggctcacaaaggtgacaagattaaagtgcattatcgtgggacactcactgatggatcagtatttgactctagctatgacagaggtgatcccttcgaattcactcttgggaatgggcaggtgataaaaggttgggaccaaggtttactaggtatgtgtgtcggcgaaaagcggaagctaagaatacccgcaaacatgggttacggcgagcgaggctccccaccaaagattccaggtggtgcaactctggttttcgacacggagctcatcgccgtcaatgggaagacatctgctggcgccaccgcggagggtgacgacagcgagctttga

SEQ ID NO: 4747 - protein, 156 aa, Triticum aestivum
MGTKKPWLLCLAVVAIAAVLLTASAKKSADVTQLQIGVKYKPESCTLQAHKGDKIKVHYRGTLTDGSVFDSSYDRGDPFEFTLGNGQVIKGWDQGLLGMCVGEKRKLRIPANMGYGERGSPPKIPGGATLVFDTELIAVNGKTSAGATAEGDDSEL

SEQ ID NO: 4748 - DNA, 561 bp, Triticum aestivum
  CDS (1)..(561)
atggcagaaaccatagatctaacaggggatggaggcgttcttaagacggtggtcagaaaagcaaaggatgatgctataagcccatctgatagccttccattggttgatgttcattatgaagggacacttgctgaaaatggcgaagtttttgacaccacacatgaagacaattctattttttcatttgaagttggccagggagctgtcattaaagcatgggatatagccttaagaactatgaaagttggcgagattgcaaaaataacatgcaggccggaatatgcgtatggaagtccaggctcgccgccagagataccagcgaatgcaacactcatttttgaggtggaattactggcttgcaagccaaggaaaggttcaagtctgggcagtgtatctgatgagaaagccaggctagaggagcttaagaaacagcgggagctggctgccgccaccaaagaggaagagaagaagaagagggaggaggcaaaggccgcagcagcggctcgtgtgcaagccaaacttgacgccaagaagggcaagggaaaaggaaagggcaaatag

SEQ ID NO: 4749 - protein, 186 aa, Triticum aestivum
MAETIDLTGDGGVLKTVVRKAKDDAISPSDSLPLVDVHYEGTLAENGEVFDTTHEDNSIFSFEVGQGAVIKAWDIALRTMKVGEIAKITCRPEYAYGSPGSPPEIPANATLIFEVELLACKPRKGSSLGSVSDEKARLEELKKQRELAAATKEEEKKKREEAKAAAAARVQAKLDAKKGKGKGKGK

SEQ ID NO: 4750 - DNA, 477 bp, Triticum aestivum
  CDS (1)..(477)
atggggacgaagaagccgcagctcctccgcctcgccgtcgtcgccgtcgccgtcgcggccgtccttctgaccgcttcggccaagaagtccgcggatgttacacagctccagatcggcgtcaagtacaagcctgaatcatgtaccctacaagctcacaaaggcgacaagattaaagtgcattatcatgggacactcactgatggatcagtatttgactctagctatgacagaggtgatcccttcgaattcactcttgggaatgggcaggtgataaaaggttgggaccaaggtttactaggtatgtgcgtcggcgaaaagcggaagctaaggatacccgcaaagatgggttacggggagcgaggctccccaccaaagattccaggtggtgcgactctggttttcgacacggagctcatcgccgtgaatgggaggacgtctgctggcgctgccgcggagagcgacgacagcgagctttga

SEQ ID NO: 4751 - protein, 158 aa, Triticum aestivum
MGTKKPQLLRLAVVAVAVAAVLLTASAKKSADVTQLQIGVKYKPESCTLQAHKGDKIKVHYHGTLTDGSVFDSSYDRGDPFEFTLGNGQVIKGWDQGLLGMCVGEKRKLRIPAKMGYGERGSPPKIPGGATLVFDTELIAVNGRTSAGAAAESDDSEL

SEQ ID NO: 4752 - DNA, 477 bp, Triticum aestivum
  CDS (1)..(477)
atggggacgaagaagccgcggctcctctgcctcgccgtcgttgccgtcgccgtcgcggccgtccttctgactgcttcggccaagaagtccgcggatgttacacagctccagatcggcgtcaagtacaagcctgaatcatgtaccctacaggctcacaaaggcgacaagattaaagtgcattatcgtgggacactcactgatggatcagtatttgactctagctatgacagaggtgatcccttcgaattcactcttgggaatgggcaggtgataaaaggttgggaccaaggtttactaggtatgtgcgtcggcgaaaagcggaagctgagaatacccgcaaagatgggttacggggagcgaggctccccaccaaagattccaggtggtgcaactctggttttcgacacggagctcattgctgtgaatgggaagacatctgctggcgccaccacggagagcaacgacagcgagctttga

SEQ ID NO: 4753 - protein, 158 aa, Triticum aestivum
MGTKKPRLLCLAVVAVAVAAVLLTASAKKSADVTQLQIGVKYKPESCTLQAHKGDKIKVHYRGTLTDGSVFDSSYDRGDPFEFTLGNGQVIKGWDQGLLGMCVGEKRKLRIPAKMGYGERGSPPKIPGGATLVFDTELIAVNGKTSAGATTESNDSEL

SEQ ID NO: 4754 - DNA, 477 bp, Triticum aestivum
  CDS (1)..(477)
atggggacgaagaagccgcggctcctctgcctcgccgtcgttgccgtcgccgtcgcggccgtccttctgactgcttcggccaagaagtccgcggatgttacacagctccagatcggcgtcaagtacaagcctgaatcatgtaccctacaggctcgcaaaggcgacaagattaaagtgcattatcgtgggacactcactgatggatcagtatttgactctagctatgacagaggtgatcccttcgaattcactcttgggaatgggcaggtgataaaaggttgggaccaaggtttactaggtatgtgcgtcggcgaaaagcggaagctgagaatacccgcaaagatgggttacggggagcgaggctccccaccaaagattccaggtggtgcaactctggctttcgacacggagctcattgctgtgaatgggaagacatctgctggcgccaccacggagagcaacgacagcgagctttga

SEQ ID NO: 4755 - protein, 158 aa, Triticum aestivum
MGTKKPRLLCLAVVAVAVAAVLLTASAKKSADVTQLQIGVKYKPESCTLQARKGDKIKVHYRGTLTDGSVFDSSYDRGDPFEFTLGNGQVIKGWDQGLLGMCVGEKRKLRIPAKMGYGERGSPPKIPGGATLAFDTELIAVNGKTSAGATTESNDSEL

SEQ ID NO: 4756 - DNA, 339 bp, Triticum aestivum
  CDS (1)..(339)
atgggattcgagaaggagatcctgaaagccggcaccggccccaagcccgtcaagggccagaaggtcaccgtccactgcaccggctacgggaaggatggtgatctgtctaagaagttttggagtaccaaggaccctgggcagcagccattctctttcaacattggtctgggttcagtgatcaaaggatgggatgagggagttatgggcatgcaattgggtgaagtcgcccgtcttacgtgcaccccagactacgcttacggtgaaggtggctttccagcctggggaattcaaccaaactccgtgctgatattcgagatcgaagttcttagcgccaagtga

SEQ ID NO: 4757 - protein, 112 aa, Triticum aestivum
MGFEKEILKAGTGPKPVKGQKVTVHCTGYGKDGDLSKKFWSTKDPGQQPFSFNIGLGSVIKGWDEGVMGMQLGEVARLTCTPDYAYGEGGFPAWGIQPNSVLIFEIEVLSAK

SEQ ID NO: 4758 - DNA, 561 bp, Triticum aestivum
  CDS (1)..(561)
atggcagaaaccattgatctaacaggggatggaggcgttcttaagacggtggtcagaaaagcaaaggatgatgctataagcccatctgatagccttccattggttgatgttcattatgaagggacacttgctgaaaatggcgaagtttttgacaccacacatgaagacaattctattttttcatttgaagttggccagggagctgtcattaaagcatgggatatagccttaagaactatgaaagttggcgagattgcaaaaataacatgcaggccggaatatgcgtatggaagtccaggctcgccgccagagataccagcgaatgcaacactcatttttgaggtggaattagttgcttgcaagccaaggaaaggttcaagtctgggcagtgtatctgatgagaaagccaggctagaggagcttaagaaacagcgggagctggctgccgccaccaaagaggaagagaagaagaagagggaggaggcaaaggccgcggcagcggctcgtgtgcaagccaaacttgacgccaagaagggcaagggaaaaggaaagggcaaatag

SEQ ID NO: 4759 - protein, 186 aa, Triticum aestivum
MAETIDLTGDGGVLKTVVRKAKDDAISPSDSLPLVDVHYEGTLAENGEVFDTTHEDNSIFSFEVGQGAVIKAWDIALRTMKVGEIAKITCRPEYAYGSPGSPPEIPANATLIFEVELVACKPRKGSSLGSVSDEKARLEELKKQRELAAATKEEEKKKREEAKAAAAARVQAKLDAKKGKGKGKGK

SEQ ID NO: 4760 - DNA, 708 bp, Zea mays
  CDS (1)..(708)
atggctgcagcagcgtgctcctctgcctcgccgctcctcctcccctcagggccgagacatgcgtcggcctccagggcgtggtttctcggcggcaggagcagggcgctgagatcagaggcgccgtgctgctgcaaggccgccgccgccgcccgtggaagcgctccgcaatgcgggacggtcggtggtggcagcagcagcacccggagggggctgctaggcgtggccctgggagcctctgccttggggctggccgcgtttgacgccgtcgccgccgggttgccgccggaggagaagcccaagctctgcgacgccgcctgcgaaggcgagctcgaaaatgtgcctatggtaactacagaatccggactgcagtacaaggatatcaaagtgggcgaagggcctagcccacccgttggtttccaggttgcagcaaattatgttgctatggtgccaactgggcagatattcgacagttcgctggagaaaggtcagccctacatattccgtgttggatcagggcaggtgatcaaggggcttgatgagggaattttgtcgatgaaggttggaggactacgtcggctgtacatacctgggccattagcgttccctaagggtcttacttctgctcctggaaggccaagagtacccccaagcagccctgtcgttttcgacgtcaatttactgtacataccaggtctcgatgatgagtga

SEQ ID NO: 4761 - protein, 235 aa, Zea mays
MAAAACSSASPLLLPSGPRHASASRAWFLGGRSRALRSEAPCCCKAAAAARGSAPQCGTVGGGSSSTRRGLLGVALGASALGLAAFDAVAAGLPPEEKPKLCDAACEGELENVPMVTTESGLQYKDIKVGEGPSPPVGFQVAANYVAMVPTGQIFDSSLEKGQPYIFRVGSGQVIKGLDEGILSMKVGGLRRLYIPGPLAFPKGLTSAPGRPRVPPSSPVVFDVNLLYIPGLDDE

SEQ ID NO: 4762 - DNA, 468 bp, Zea mays
  CDS (1)..(468)
atggggaagaagcggcagcttgtctgcctcgcagccgccgtcgccgccgcggccatcctcctgacagcgtcggccaagaagtccagcgacgtcaccgagcttcagatcggcgtcaagtacaaacctgagtcatgtatcctgcaagcacacaaaggagacaaaattaaggttcattatcgtggggcactcactgacggatcagtttttgattctagctatgacagaggtgacccgtttgaatttactcttggaaatggccaagtgataaaaggctgggaccaaggattgctaggtatgtgcgtcggtgaaaagcggaagctaaagatacctgcaaagatgggctatggcgagcgaggctccccaccgaagattccaggcggagcgactctggtcttcgacacggagcttatcgccgtcaacgggaagacatctggcggtgcaaatccagaaactgaaagtgagctctga

SEQ ID NO: 4763 - protein, 155 aa, Zea mays
MGKKRQLVCLAAAVAAAAILLTASAKKSSDVTELQIGVKYKPESCILQAHKGDKIKVHYRGALTDGSVFDSSYDRGDPFEFTLGNGQVIKGWDQGLLGMCVGEKRKLKIPAKMGYGERGSPPKIPGGATLVFDTELIAVNGKTSGGANPETESEL

SEQ ID NO: 4764 - DNA, 447 bp, Zea mays
  CDS (1)..(447)
atggcgaagccgcagcttcttctctgtttcctactcgccgcctccgcgccgctaatcgtcgccacggccaagaaatccggggacgtgtcggagctccagatcggcgtcaagtacaagccggaatcatgcagcattcaagctcacaaaggtgacaaggttaaagttcactaccgtggaaaacttactgatggaacggtttttgattcaagctatgaaagaggtgacccgattgaatttgaattgggcactggacaagtgatcaaaggatgggatcagggtctcctgggaatgtgcgttggtgaaaagcggaagttgaagatcccatcaaagcttggctatgggcctcaaggctcgccacctactattcctggtggagcaaccctcatatttgacacggagcttgtcgctgtcaatggagaaccaaccaaccaatctgacgagctttag

SEQ ID NO: 4765 - protein, 148 aa, Zea mays
MAKPQLLLCFLLAASAPLIVATAKKSGDVSELQIGVKYKPESCSIQAHKGDKVKVHYRGKLTDGTVFDSSYERGDPIEFELGTGQVIKGWDQGLLGMCVGEKRKLKIPSKLGYGPQGSPPTIPGGATLIFDTELVAVNGEPTNQSDEL

SEQ ID NO: 4766 - DNA, 681 bp, Zea mays
  CDS (1)..(681)
atggcgccacccatcacgtccctgtcgtctctgatggcgtccagcccaataccgacgccgccgccgccgctcccgaagaccagcggcagagcgctctccgtcgcgccctgcggctccgcgtcgtcctcgtcgccgtccacttcctcgactcctcatccggtggcggcgtcggcgtcggcgggcaggagggggctgctggcgctgggcgccgggttcctggcctcggccgcgctgctgtccccggcgggcgacgccggcgccacgcgcatcgagtactacgcgacggtcggggacaagatgtgcgacctgagcctcgtcaagtccggcctcgcgtactgcgacgtcgaggtcggcaccggcgtccagcccccgcgcggcgagctcatcaatgtgcactacaccgcgagatttcccgacggtacgctgttcgacagcagctacaagcgcgggaggccactgacgatgcgcataggcgcaggcaagatcctccgagggcttgaacaggggatcagtggcggcggcggtgtgccgcccatgcttgttggtggaaagcgcaagctgatgatacctgcgtcactggcgtacgggcctgaaccggcaggctgcttctcaggagactgcaacatccccggaaactccacacttctatatgaccttttcctcgtcgggatctacaagtga

SEQ ID NO: 4767 - protein, 226 aa, Zea mays
MAPPITSLSSLMASSPIPTPPPPLPKTSGRALSVAPCGSASSSSPSTSSTPHPVAASASAGRRGLLALGAGFLASAALLSPAGDAGATRIEYYATVGDKMCDLSLVKSGLAYCDVEVGTGVQPPRGELINVHYTARFPDGTLFDSSYKRGRPLTMRIGAGKILRGLEQGISGGGGVPPMLVGGKRKLMIPASLAYGPEPAGCFSGDCNIPGNSTLLYDLFLVGIYK

SEQ ID NO: 4768 - DNA, 468 bp, Zea mays
  CDS (1)..(468)
atggggaagaagcggcagcttatctgcctcgcagccgccgtcgccgccgcggccatcctcctgacagcgtcggccaagaagtccagcgacgtcaccgagcttcagatcggcgtcaagtacaaacctgagtcatgtatcctgcaagcacacaaaggagacaaaattaaggttcattatcgtggggcactcactgacggatcagtttttgattctagctatgacagaggtgacccgtttgaatttactcttggaaatggccaagtgataaaaggctgggaccaaggattgctaggtatgtgcgtcggtgaaaagcggaagctaaagatacctgcaaagatgggctatggcgagcgaggctccccaccgaagattccaggcggagcgactctggtcttcgacacggagcttatcgccgtcaacgggaagacatctggcggtgcaaatccagaaactgaaagtgagctctga

SEQ ID NO: 4769 - protein, 155 aa, Zea mays
MGKKRQLICLAAAVAAAAILLTASAKKSSDVTELQIGVKYKPESCILQAHKGDKIKVHYRGALTDGSVFDSSYDRGDPFEFTLGNGQVIKGWDQGLLGMCVGEKRKLKIPAKMGYGERGSPPKIPGGATLVFDTELIAVNGKTSGGANPETESEL

SEQ ID NO: 4770 - DNA, 708 bp, Zea mays
  CDS (1)..(708)
atggctgcagcagcgtgctcctctgcctcgccgctcctcctcccctcagggccgagacatgcgtcggcctccagggcgtggtttctcggcggcaggagcagggcgctgaggtcagaggcgccgtgctgctgcaaggccgccgccgccgcccgtggaagcgctccgcaatgcgggacggtcggtggtggcggcagcagcacccggagggggctgctaggcgtggccctgggagcctctgccttggggctggccgcgtttgacgccgtcgccgccgggttgccgccggaggagaagcccaagctctgcgacgccgcctgcgaaggcgagctcgaaaatgtgcctatggtaactacagaatccggactgcagtacaaggatatcaaagtgggcgaagggcctagcccacccgttggtttccaggttgcagcaaattatgttgctatggtgccaactgggcagatattcgacagttcgctggagaaaggtcagccctacatattccgtgttggatcagggcaggtgatcaaggggcttgatgagggaattttgtcgatgaaggttggaggactacgtcggctgtacatacctgggccattggcgttccctaagggtcttacttctgctcctggaaggccaagagtacccccaagcagccctgtcgttttcgacgtcaatttactgtacataccaggtctcgatgatgagtga

SEQ ID NO: 4771 - protein, 235 aa, Zea mays
MAAAACSSASPLLLPSGPRHASASRAWFLGGRSRALRSEAPCCCKAAAAARGSAPQCGTVGGGGSSTRRGLLGVALGASALGLAAFDAVAAGLPPEEKPKLCDAACEGELENVPMVTTESGLQYKDIKVGEGPSPPVGFQVAANYVAMVPTGQIFDSSLEKGQPYIFRVGSGQVIKGLDEGILSMKVGGLRRLYIPGPLAFPKGLTSAPGRPRVPPSSPVVFDVNLLYIPGLDDE

SEQ ID NO: 4772 - DNA, 561 bp, Zea mays
  CDS (1)..(561)
atggaagagatgatagatctaacgggggatggaggtgttcttaagacagtagtgcggaaagcaaaagatgatgctatagcgccatccgagagcctgcccttggttgatgttcattacgaaggtacacttgctgagactggtgaagttttcgataccacccatgaagataactctattttctcatttgaaattggacaaggcgctgtcatcaaagcatgggatatagccttaagaactatgaaggttggtgaggttgcaaaaattacatgcaaatcagaatatgcatatggagctgcaggctcaccaccagagatacctcctaatgcaacccttatttttgaggtggagctagtagcttgcaggccgaggaaaggttcaagcttaggcagtgtatctgatgagaaagccagacttgaagaacttaagaagcaacgggagctagctgctgctaccaaagaagaggagaaaaagaagagggaggaagcgaaggccgcggcagcagcccgggtgcaagcaaagcttgatgccaagaaggggaaggggaagggaaagggaaaatag

SEQ ID NO: 4773 - protein, 186 aa, Zea mays
MEEMIDLTGDGGVLKTVVRKAKDDAIAPSESLPLVDVHYEGTLAETGEVFDTTHEDNSIFSFEIGQGAVIKAWDIALRTMKVGEVAKITCKSEYAYGAAGSPPEIPPNATLIFEVELVACRPRKGSSLGSVSDEKARLEELKKQRELAAATKEEEKKKREEAKAAAAARVQAKLDAKKGKGKGKGK

SEQ ID NO: 4774 - DNA, 25 bp, Artificial sequence
  primer
atgtctgaagtaattgaaggtaacg

SEQ ID NO: 4775 - DNA, 25 bp, Artificial sequence
  primer
ttagttgaccttcaacaattcgacg

SEQ ID NO: 4776 - protein, 139 aa, Artificial sequence
  consensus sequence
  Variant (2)..(6): Xaa in position 2 to 6 is any amino acid
  Variant (9)..(9): Xaa in position 9 is any amino acid
  Variant (11)..(14): Xaa in position 11 to 14 is any amino acid
  Variant (15)..(25): Xaa in position 15 to 25 is any or no amino acid
  Variant (27)..(28): Xaa in position 27 to 28 is any amino acid
  Variant (33)..(34): Xaa in position 33 to 34 is any amino acid
  Variant (36)..(36): Xaa in position 36 is any amino acid
  Variant (37)..(38): Xaa in position 37 to 38 is any or no amino acid
  Variant (40)..(40): Xaa in position 40 is any amino acid
  Variant (41)..(41): Xaa in position 41 is any or no amino acid
  Variant (43)..(44): Xaa in position 43 to 44 is any amino acid
  Variant (46)..(46): Xaa in position 46 is any amino acid
  Variant (48)..(48): Xaa in position 48 is any amino acid
  Variant (51)..(51): Xaa in position 51 is any amino acid
  Variant (55)..(55): Xaa in position 55 is any amino acid
  Variant (57)..(59): Xaa in position 57 to 59 is any amino acid
  Variant (60)..(70): Xaa in position 60 to 70 is any or no amino acid
  Variant (72)..(73): Xaa in position 72 to 73 is any amino acid
  Variant (75)..(78): Xaa in position 75 to 78 is any amino acid
  Variant (80)..(86): Xaa in position 80 to 86 is any amino acid
  Variant (89)..(90): Xaa in position 89 to 90 is any amino acid
  Variant (92)..(94): Xaa in position 92 to 94 is any amino acid
  Variant (95)..(120): Xaa in position 95 to 120 is any or no amino acid
  Variant (123)..(125): Xaa in position 123 to 125 is any amino acid
  Variant (126)..(129): Xaa in position 126 to 129 is any or no amino acid
  Variant (131)..(131): Xaa in position 131 is any amino acid
  Variant (133)..(134): Xaa in position 133 to 134 is any amino acid
  Variant (135)..(137): Xaa in position 135 to 137 is any or no amino acid
GXXXXXHYXGXXXXXXXXXXXXXXXGXXFDSSXXRXXXPXXFXXGXGXVIXGWDXGXXXXXXXXXXXXXXMXXGXXXXLXXXXXXXYGXXGXXXXXXXXXXXXXXXXXXXXXXXXXXXXXIPXXXXXXXLXFXXXXXEL

SEQ ID NO: 4777 - protein, 14 aa, Artificial sequence
  protein pattern
  Variant (2)..(2): Xaa in position 2 is any or no amino acid
  Variant (4)..(6): Xaa in position 4 to 6 is any amino acid
  Variant (7)..(7): Xaa in position 7 is any or no amino acid
  Variant (9)..(9): Xaa in position 9 is any amino acid
  Variant (11)..(11): Xaa in position 11 is Asp, Glu or Gln
  Variant (12)..(12): Xaa in position 12 is any amino acid
IXPXXXXLXFXXEL

SEQ ID NO: 4778 - DNA, 2217 bp, Saccharomyces cerevisiae
  CDS (1)..(2217)
atggttgccgaagaggacatcgagaagcaagtccttcaattgatagacagcttttttctgaagactacactactaatatgctccaccgaatcaagtcgataccagtcttctacagaaaatatattcctatttgacgacacatggtttgaagatcactcagaattagtgagtgagctacccgagataatatcaaaatggtctcactacgatggtcgaaaagagttgccacccttagtggtagagacatatttggatttaagacagttaaactcgtctcatttagttagattaaaggaccacgaaggccatttgtggaacgtttgcaaaggaactaagaagcaggaaatcgtgatggaacgttggcttatcgaattagataattcatccccaactttcaaatcatacagtgaagatgagactgatgttaatgaactttctaaacagctagtccttctcttccgttatttgttgactttaatacagttactacccacaacagaattataccaattattaataaagtcttataacggcccgcaaaatgaaggaagttccaatccaataacttccacgggcccactagtaagtatccggacgtgtgtccttgacggatctaaaccaattttatcgaaggggagaatagggttgagcaaaccgattattaatacatattccaatgcgcttaacgaatcaaacctgccagcccatttagatcaaaagaagatcacacctgtatggacaaagtttggactcttaagagtctcggtatcatacagacgtgattggaagtttgaaattaacaatacaaacgacgaattattttcagctcgacatgcatctgtctcacataactcacaaggaccccagaatcagccagaacaagaaggacaaagtgatcaagacatagggaaacgccaaccacaatttcaacagcagcagcagccccaacagcagcagcagcagcagcaacagcaacagagacaacaccaggtccagacacaacaacaaagacagatacctgataggagatctctttcactttctccttgtacaagagccaattcttttgaaccacaatcttggcagaagaaagtctatccaatatcgagacctgttcaaccatttaaagttggttcaattggaagtcaaagtgcgagcagaaatccctctaattcatcgtttttcaaccaaccacctgttcataggccaagtatgagctccaactacgggccacaaatgaatattgaaggtaccagtgttggaagcacctcaaagtattcctcctcctttgggaacattcgtcgtcactcaagtgtaaagacgacagagaatgctgaaaaagtatcaaaagctgtaaagagcccactacaacctcaagaatcacaagaagatttaatggattttgttaaattactcgaagaaaaacccgatctaactataaagaagacaagtggaaataatccacccaatatcaatatttctgattctctaatcagatatcagaatttgaagccaagtaatgacttattaagtgaagatttatccgtaagtttatccatggatccaaatcatacatatcacagaggcagatcagattcccactcaccattgccttcaatatccccttcgatgcattatggatcgttgaactcgagaatgtctcaaggcgccaatgcaagccatttgattgcaagaggcggtgggaattcatctactagtgccttgaatagtagaaggaattctttagataagagctcaaacaagcagggtatgtcaggcttacctcctatttttggtggagagagtacttcatatcaccacgacaacaaaatacaaaagtacaaccaattaggagtagaagaagatgatgatgacgagaatgaccgtttgctcaaccaaatgggaaacagtgctacaaaattcaaaagttcaatatctccaagatcaattgatagcatttcaagttctttcataaaaagtaggatacctatcagacaaccataccattactctcaaccaactactgcgccctttcaagctcaggcgaaatttcataaacctgcaaataagttaatcgataatggtaataggagtaatagtaacaataacaatcataatgggaatgatgcagttggtgtgatgcataatgacgaggatgatcaagatgatgatctagtatttttcatgagtgatatgaacctttctaaagaaggttaa

SEQ ID NO: 4779 - protein, 738 aa, Saccharomyces cerevisiae
MVAEEDIEKQVLQLIDSFFLKTTLLICSTESSRYQSSTENIFLFDDTWFEDHSELVSELPEIISKWSHYDGRKELPPLVVETYLDLRQLNSSHLVRLKDHEGHLWNVCKGTKKQEIVMERWLIELDNSSPTFKSYSEDETDVNELSKQLVLLFRYLLTLIQLLPTTELYQLLIKSYNGPQNEGSSNPITSTGPLVSIRTCVLDGSKPILSKGRIGLSKPIINTYSNALNESNLPAHLDQKKITPVWTKFGLLRVSVSYRRDWKFEINNTNDELFSARHASVSHNSQGPQNQPEQEGQSDQDIGKRQPQFQQQQQPQQQQQQQQQQQRQHQVQTQQQRQIPDRRSLSLSPCTRANSFEPQSWQKKVYPISRPVQPFKVGSIGSQSASRNPSNSSFFNQPPVHRPSMSSNYGPQMNIEGTSVGSTSKYSSSFGNIRRHSSVKTTENAEKVSKAVKSPLQPQESQEDLMDFVKLLEEKPDLTIKKTSGNNPPNINISDSLIRYQNLKPSNDLLSEDLSVSLSMDPNHTYHRGRSDSHSPLPSISPSMHYGSLNSRMSQGANASHLIARGGGNSSTSALNSRRNSLDKSSNKQGMSGLPPIFGGESTSYHHDNKIQKYNQLGVEEDDDDENDRLLNQMGNSATKFKSSISPRSIDSISSSFIKSRIPIRQPYHYSQPTTAPFQAQAKFHKPANKLIDNGNRSNSNNNNHNGNDAVGVMHNDEDDQDDDLVFFMSDMNLSKEG

SEQ ID NO: 4780 - DNA, 2286 bp, Candida albicans SC5314
  CDS (1)..(2286): transl_table=12
atgttgtcagatttcaaacaacagcagcaacaaaagcatcattcacataatccaccaaatagtcatgacgatactcagactaaattgcaagttgccaaattgactcaagtgattcagaagtttttcaccaaggcagcacaaatcattctagaatcaagagcgtatccagaaacttcaacgccttcattatatcccactaaggaagagtcaagtaaaataaataaatggtttaacctttacatgaccaatataccagatctgtgcaaagatgatttgaagttgtggaaaggagttgacttaaccactattccaccaatgattatagaaacctatattgatttgagaagcttgccagccgatcaaactttagttttgatggatgatgaaaaacatccttggacagtggcaaaatcacgtggcaaaaagcaagaagtcgttctagagagatggttaattgaatttgaaccaaacactacagacgccaccgtgatggttgaagaactacctttgagctataaacaggcaatagtgctctttagaagcatatatgggtttacaagattgatgccagcattcaaagtgaaaaagaatttacagaacaaattgcccttgggaaataaaatattagatggtaatcaaccaattagctccaaaggtagaattggattatctaaacctattatcaataccagaactaatgagtctcatatgacacagaaatattttcaaccagtacatacaagtctcgggacattaaaaatatcggtagcttatagaatggattccgagttttgtctacatgaaaatgaagagttactactgtcccatttccataagcgtgatgaagaagaaacgaaaaagaaagtgtcatcctcagtttctcctctttcctcgggtacaagcttaaaagaaacatcaacttcaccaaggaaatcacagcctcccatccgtatacagccatttaaagttggatcgatgagtacatcgccaccagtgcaatcaccatcaatttcacaaccaggaacagcaccaattcaaaatcaaccaagtgtcccgtcgtcttcattagaaagaagagtatcgatcactagtaacaaatcaacttctaatgcatcattagcggcatttttacgtaatgccagaagtagtactccgtcagcaaataatattcccataatcaatgcaaatcccatttctggtacgtctgttccacggtcttttagttcgtctacgggtcatgaggattccatttttgtcaatcctgatagtgctagtaacactcctcgatttgcatcgtcatttggttcacgcgcaagcagacggtatagtagtaccagtatcagacaacaaactccccaatccgatttaatgggtcaaaccaatagtgttgatgcggctttgagtggaatagatgctgatgatgacataagtgactttgtccgtatgattgatagtaaatcagatttgagattaggcggtggcggtggtggtggaaacagcagtgttcacaatatgagtatcaatgaatcatcatatcatggggatgcgttaaataaatttcaatcattgcgcagtcagtatcaacaattgagtgatagtgtcagtgctagtttgattttgcaatcacgtcattctagtaggaaaagttctttgaattcacctgcgggatcatttgatctgcatcatcaccaacatcaacaacaacaacaacaacaacagaatcaacaacaatctcaatcaccacacactaatacaacatcatctattcattctcacgcacattcttattcccattctcggatgaaggatgcaagacctagaagtgaagaccatcaacaaactaaattttccgcagcaagaagaagttcaaatatttcacccactacagcagtaccaagttcaattggtacaccatcactgataagttcaagaatacctcatgtaactacaattatctcatctagtgatgtgagcagtactggaggtaatcgtacgaaaagtgctgccacaacagctattgttagtggtatggctacttcgccttccatatatgactatcgatcacctcgttaccagaatgtttttgatgacgatgacgaggatgataatgacgaagaagaaggcgatcgtgaaggtaatcaattacacgagggcagaaatagtacagaaagtagtcaaaatcaatcaaaacgtataatgaaacatattaaaaaagatgaagaggatagtgaagatgacgaagatttgttgtttactatgagtgatatgaattcaaggaatttttga

SEQ ID NO: 4781 - protein, 761 aa, Candida albicans SC5314
MLSDFKQQQQQKHHSHNPPNSHDDTQTKLQVAKLTQVIQKFFTKAAQIILESRAYPETSTPSLYPTKEESSKINKWFNLYMTNIPDSCKDDLKLWKGVDLTTIPPMIIETYIDLRSLPADQTLVLMDDEKHPWTVAKSRGKKQEVVLERWLIEFEPNTTDATVMVEELPLSYKQAIVLFRSIYGFTRLMPAFKVKKNLQNKLPLGNKILDGNQPISSKGRIGLSKPIINTRTNESHMTQKYFQPVHTSLGTLKISVAYRMDSEFCLHENEELLSSHFHKRDEEETKKKVSSSVSPLSSGTSLKETSTSPRKSQPPIRIQPFKVGSMSTSPPVQSPSISQPGTAPIQNQPSVPSSSLERRVSITSNKSTSNASLAAFLRNARSSTPSANNIPIINANPISGTSVPRSFSSSTGHEDSIFVNPDSASNTPRFASSFGSRASRRYSSTSIRQQTPQSDLMGQTNSVDAALSGIDADDDISDFVRMIDSKSDLRLGGGGGGGNSSVHNMSINESSYHGDALNKFQSLRSQYQQLSDSVSASLILQSRHSSRKSSLNSPAGSFDSHHHQHQQQQQQQQNQQQSQSPHTNTTSSIHSHAHSYSHSRMKDARPRSEDHQQTKFSAARRSSNISPTTAVPSSIGTPSSISSRIPHVTTIISSSDVSSTGGNRTKSAATTAIVSGMATSPSIYDYRSPRYQNVFDDDDEDDNDEEEGDREGNQLHEGRNSTESSQNQSKRIMKHIKKDEEDSEDDEDLLFTMSDMNSRNF

SEQ ID NO: 4782 - DNA, 1980 bp, Ashbya gossypii
  CDS (1)..(1980)
atggctatggaatcggaatgcaatgtggtagagctgatcggcgggttcttcctgaaggcgacgctgcttgtgtgccagcctcggacgggggcaattgaaggggatggtgaggaggaccggacgtttaatatcagcagcgcggctgatgcgggcgtggcggaggcggtgcgggcgtggacggcctacgacggggcgcaggagttgccgccgctagtgatagagatgttcctggacctgcggcggctggggccacaacacacggtggtgctgaaggaccaggacggcaacccgtggaatgtttgcaagggcgggaagaagtctgaaatcatgctggagcggtggttggtcgaactggacgtgggcaatgaggaggcgcgcccggaggagccacccaatgcggctgagatatacaagcagctggtgctactgttccgctatctgtacacgctgacgcagctactccccgcgaacgagttgtacgcacggctgcacgggccttctaaccagggcgaggcagcaatgcctttgatcaatatagggacacgtatactggatggctccaagcctatcctgtcgaaaggtcgcgtggggcttagcagaagtattatcgccacctacacgaatgtaatcaacgagaccaatgtggcctctcatctggaacaaaaaaagatcactccaatcagcacgggctacggctcactgcggattacagtatcctatcgacgtgactgtaactttgacgtcaacgaggttttagattatgaaggcaataactgcagcagcagctctgttgtcgatacacacacgaaacctggagtgggcccgctatcttcattaaggagagtgtcaatccacagtaatcgatccatgtctatttctccccaaacggtttacagcgggactgtgatccccgatccatcccctcaaagaaagtcatcttcttccagaatacaaccattcaaggctggctctgttggaagcggctccctcgcaatcgcgaggaatccatctggttcatctgctgtcgccaccctgagagcgcagaggtccgggagcgcatccatctctacgcatgtggccgaccaagccgttggcgaaccgtccagcgtaggcagcggcgggtccaaatattcatcttcctttggtaaaataaggcgacagtcaagtatgcggcggtctgggagtcttgaattgcctgccgctaagcaagcgaaacctggtgagcgcggatctgatgagttgctagactttgtgaaaatgttggaggaaaaacaggaactaaatgtgaagaagctatacggtactaccaccgacatctccagctcgttagtccgttttcaatcaatgaaatcaaacaacgatacactaagcgaagacctatctatgagctactcgctggagcctacacatgctcctcaggtaaggtataggtctaactcgcattcgcccattccatccatctctccctctgtacaatacacctctatcccgatgagactttcccaaagtcgcaacgtaagccaaactgaattagctagcagaaagaactctgctgaaaggctgaaaactttgatttcgagtaggacaggtagcttctcggagtccaggcgccagtcaaatgcgggacaagaggatattctcgaagatgaggatgatgaggcagaagagatcctattgagcaagtcgcatctcagcaaccctacaggaacaagattgcaatcaatgtcgccgcaatccttaaaaagcatttcctcgtacaatagagcggcagtgccgttcaagcctgtttctaacttttcatgtcccactacaatggctacccctgcacatgcaaaattacacaaggcaagtatcagttcatcaccagataatcagtccggcctggtcaaaaaggaccacgagcacagcacaatgacgggcggtgatgatgatgacgacttgctattctttatgagtgatatgaacctatctagccaatga

SEQ ID NO: 4783 - protein, 659 aa, Ashbya gossypii
MAMESECNVVELIGGFFLKATLLVCQPRTGAIEGDGEEDRTFNISSAADAGVAEAVRAWTAYDGAQELPPLVIEMFLDLRRLGPQHTVVLKDQDGNPWNVCKGGKKSEIMLERWLVELDVGNEEARPEEPPNAAEIYKQLVLLFRYLYTLTQLLPANELYARLHGPSNQGEAAMPLINIGTRILDGSKPILSKGRVGLSRSIIATYTNVINETNVASHLEQKKITPISTGYGSLRITVSYRRDCNFDVNEVLDYEGNNCSSSSVVDTHTKPGVGPLSSLRRVSIHSNRSMSISPQTVYSGTVIPDPSPQRKSSSSRIQPFKAGSVGSGSLAIARNPSGSSAVATLRAQRSGSASISTHVADQAVGEPSSVGSGGSKYSSSFGKIRRQSSMRRSGSLELPAAKQAKPGERGSDELLDFVKMLEEKQELNVKKLYGTTTDISSSLVRFQSMKSNNDTLSEDLSMSYSLEPTHAPQVRYRSNSHSPIPSISPSVQYTSIPMRLSQSRNVSQTELASRKNSAERLKTLISSRTGSFSESRRQSNAGQEDILEDEDDEAEEILLSKSHLSNPTGTRLQSMSPQSLKSISSYNRAAVPFKPVSNFSCPTTMATPAHAKLHKASISSSPDNQSGLVKKDHEHSTMTGGDDDDDLLFFMSDMNLSSQ

SEQ ID NO: 4784 - DNA, 1983 bp, Candida glabrata
  CDS (1)..(1983)
atgtcaaatgggaatgacaatcaggttattgaactgatccagaatttcttcctgaaatcagcgggtctggtcacaacagtggaaagcaatcgatactctcttgatgacacatccatagaattcgatgacgaatggtttgatatgaatattgatgtcttacatgatttaccaccaataatagataaatggacgaacttcgatggtacccaggaattaccaccattagtgatagaaacatttttagatttacatttactaccatcaagttatacagtgcgtttacgtgatgatgagagccacttatgggctgtatcaaaaggaaacaagaaatcagagattgtactagaaagatggctgatagaactggataaggaatctacttcattcaaaaatcacgttcagagtggttcaggtgtttctcctgagaaattagatcaacagcttagattactcttccgatatttatttacgttactgcaactccttccttccaatgacttaatgatggctttaaataatcagtcagaatctcataacacaccaatacctgtagatatcaaaacaagaatactagatggctctcagcctatattatcgaaaggaaggattggattgagtagaccaattattagctcctactctaatataatcaacaatagcaatatccctgcacatttagaacaaaaaaaaataacgccagtgtggactaagtatggacttcttaggatttcagtgtcatacagaagggattgccaatttatatttcaagacctaaatgaagataactcaccaaatacgcaaatcacaaatcaaccagcaaaaactaatgaaatatcaatatctttatctcccagatctaaaaatgatcttaaccaaatatcacatccttcctggcaaaagaaatttatatcatcctctaagcaatttcagccttttattgttggttctgttggaagtgcgaataccccaaatcaaaactcaagtcgtaacccttcaaactcttctgtagtaggtcctcattatcatcctcaacacagattaagtattggatcatctactagtgtttctacgcaacccaattatgaaggtactagcgtcggaagtacatcaaaatttgcctcttccttcaataacttgcgccgccactctagtgtaagataccatgaaagcaccgaaaagttggccaagacagacaagaataattatgaggatacagacgatttaatggaatttgtccgactcatagaagcaaaaccagaactgcaacctaaaaaagggttatcaggtctacaagataagaatttgtctggatcgattttaagatatcaaaaactaagaccaagtaatgatatgttatcggaggatctagctttaagtgtttccattgatcccattcatggatcacaaagaagaaattcaaattcacactcacattctcctgttgcatccttttccccgtctggccatttttcttcgattaattctaaattgtctcaaccacatttggctgtcagaggaagtagtagtactgtcaatagtagaagaaattcggtagataaagttctcgctagtgcactatctccaatctatggtggggatattccagaatatcatacgaagtctcataaccctgtttttaatgaagttgacgatgaagaggaaggaaacgatgatttgttggtcaacaaaataccaatcaatatcaataagcataaaatgtcaacttcaccacgttcaattgacagtatctcaaattcgctaacacgaaacagaactccattcagacaaccatatcaatattcacaacctactactattgcaacgcaggcatatgcaaaaatgcacagaccgaccgttcgatcttctgatgcaatatcagagatcaattcaagaaaaggcgataatttccatcaactgattaatgataacgacgaagatgatttagtattttttatgagtgatatgaatttaccgagggaataa

SEQ ID NO: 4785 - protein, 660 aa, Candida glabrata
MSNGNDNQVIELIQNFFLKSAGLVTTVESNRYSLDDTSIEFDDEWFDMNIDVLHDLPPIIDKWTNFDGTQELPPLVIETFLDLHLLPSSYTVRLRDDESHLWAVSKGNKKSEIVLERWLIELDKESTSFKNHVQSGSGVSPEKLDQQLRLLFRYLFTLLQLLPSNDLMMALNNQSESHNTPIPVDIKTRILDGSQPILSKGRIGLSRPIISSYSNIINNSNIPAHLEQKKITPVWTKYGLLRISVSYRRDCQFIFQDLNEDNSPNTQITNQPAKTNEISISLSPRSKNDLNQISHPSWQKKFISSSKQFQPFIVGSVGSANTPNQNSSRNPSNSSVVGPHYHPQHRLSIGSSTSVSTQPNYEGTSVGSTSKFASSFNNLRRHSSVRYHESTEKLAKTDKNNYEDTDDLMEFVRLIEAKPELQPKKGLSGLQDKNLSGSILRYQKLRPSNDMLSEDLALSVSIDPIHGSQRRNSNSHSHSPVASFSPSGHFSSINSKLSQPHLAVRGSSSTVNSRRNSVDKVLASALSPIYGGDIPEYHTKSHNPVFNEVDDEEEGNDDLLVNKIPININKHKMSTSPRSIDSISNSLTRNRTPFRQPYQYSQPTTIATQAYAKMHRPTVRSSDAISEINSRKGDNFHQLINDNDEDDLVFFMSDMNLPRE

SEQ ID NO: 4786 - DNA, 2514 bp, Debaryomyces hansenii
  CDS (1)..(2514): transl_table=12
atggtttcacccgggcagaatgacttatcttctgataagagtcagatcgatccttttgttaaaaagcagaatgccaagttaacacaggtaattcagaactttttcagtaagtctgttcagatagttctacaatcaaggatccagtcagaaagtcataataaagaggaacagctcaaggtaggaggtgatgttggaggtcataatgtaagctcaaaaatcaacaaatggtttaatttgcatatgtataatgataacttacccaaagaagagcttaagttatggaagaatataaatgacgtgtcccagatgcctccgatgattatcgaggtatacttggatttaagacaattgacggcgatacaaactgtgatattacgggatgataatggtaacccatggacagtggcgaagggaggttcaaaaaagcatgaagttgtactagagagatggcttattgagtttgatgcgaatactgtttctggaactatagtagatgaattgccattgatatacaaacaggcaatcattttgtttcgaagtctatatgggtacacaaggcttatgccgactttcaaattgaaaaagaacttaaataagtcgaatctaaatatagggtgtaagattcttgatggtaaacaacctattagctcaaaaggtaggatcggtctttcgaaatcaattatcccacatcaaatgttaactactgaatcacatatgagccataaacatttcttgcctatacagaccactttaggtacgcttaagatttcaatcgcttataggaaccatcatgaattttctattcatgataatgaagaattattatccactcacttcgttaatattgatgataatgacaaagattctgaaatcactccagttgaaattgagtttaaggaagaattaaaaattgacagagattcgactaccaatgaaaaagtgaatgaacctgaagatgatgagctgcatcatgcagacgttgaaagtagccaagaacatttacaatcggaagagccagatgaatcgttcgaacaagatgctaaacatataagtggctcgcgtaagaaattctctatatcaaataatgcttctatgtcactttcaccatgttcatcaggtccccaaacagtgacggaagattctccatcgcataataagccatcggcaaatacaacaccgattgtatcacagcgtccaactataaatccattcaaggttgggtctatcagtacatctccaccagcaacgacgaattttggaggatcttccttagagagaaaggtgtcaattacgagcaacaagtctgcgtctaatgcttcattggcagctatgttgagaaatcctaggagtagcacttcctcaaccaacactactgcaaatatccctattgcgaataataattctaataatcaatacaattcaacattccctcgttcggtttcctcatctcatgggtctaatttggcccatgataatgataacttacttgggttttctaatccagacaatacttccaacactccaagattctcatcatcctttggatcccgagctagcaggagattctcaaatacaagtggtcgtcaaagcagtttgccatctggtaacatgaatgacacgtcgcttttagctacaagtgcaggactggcttcatcggatgccccaatgagtggactctacatagatgatgacataggtgatttcgtccggatgatcgacagcaaatctgacctcaggttttcaggctacaattcaaataatgattctaagatttcgtataaccagggttcaaacagtcagatagatgctttgaataaattccaaatgctaaagaaccagcatcagcaattaagtgacagtgtgagtgccagtctaatcttacaccataaccaacttagcggaagcaggccatcaagtaggaaatcgtcgcattctatacactctcctcccccttcgttaccttcaggttcctacgataattcacacttgccctcaattaattccaaattgagagaaaatagtagcaccagtggaaatgatgataatcttgctagagattctggtactccatcttcgcgaaagaatagctttgattattcgactaacagcaacactacattcttgaaatccccaattacgaataagttagtatcatccccggtaacctcgactacacccattcattcgtgtttacataagacaaataacgaatcgggtgtaatttccggtttggctactaccccttccatctataatgatcgccgtcaaattcattacgaaagtgtgttcgatgatgatgatgatgactatgcaaacaatacagcggataatcgtgatcaagacgatagtctaaaattgtaccttaccaacaagcttgctaatgcgcctaaatctaacaccaattcaagaagtcttaaatcttctaccaaccccccaaatattggtgaagatgatgatgatgatgatgatgatttattatttaccatgagtgacatgaatcttgctaaacactga

SEQ ID NO: 4787 - protein, 837 aa, Debaryomyces hansenii
MVSPGQNDLSSDKSQIDPFVKKQNAKLTQVIQNFFSKSVQIVLQSRIQSESHNKEEQLKVGGDVGGHNVSSKINKWFNLHMYNDNLPKEELKLWKNINDVSQMPPMIIEVYLDLRQLTAIQTVILRDDNGNPWTVAKGGSKKHEVVLERWLIEFDANTVSGTIVDELPLIYKQAIILFRSLYGYTRLMPTFKLKKNLNKSNLNIGCKILDGKQPISSKGRIGLSKSIIPHQMLTTESHMSHKHFLPIQTTLGTLKISIAYRNHHEFSIHDNEELLSTHFVNIDDNDKDSEITPVEIEFKEELKIDRDSTTNEKVNEPEDDELHHADVESSQEHLQSEEPDESFEQDAKHISGSRKKFSISNNASMSLSPCSSGPQTVTEDSPSHNKPSANTTPIVSQRPTINPFKVGSISTSPPATTNFGGSSLERKVSITSNKSASNASLAAMLRNPRSSTSSTNTTANIPIANNNSNNQYNSTFPRSVSSSHGSNLAHDNDNLLGFSNPDNTSNTPRFSSSFGSRASRRFSNTSGRQSSLPSGNMNDTSLLATSAGLASSDAPMSGLYIDDDIGDFVRMIDSKSDLRFSGYNSNNDSKISYNQGSNSQIDALNKFQMLKNQHQQLSDSVSASLILHHNQLSGSRPSSRKSSHSIHSPPPSLPSGSYDNSHLPSINSKLRENSSTSGNDDNLARDSGTPSSRKNSFDYSTNSNTTFLKSPITNKLVSSPVTSTTPIHSCLHKTNNESGVISGLATTPSIYNDRRQIHYESVFDDDDDDYANNTADNRDQDDSLKLYLTNKLANAPKSNTNSRSLKSSTNPPNIGEDDDDDDDDLLFTMSDMNLAKH

SEQ ID NO: 4788 - DNA, 2055 bp, Kluyveromyces lactis
  CDS (1)..(2055)
atgtcagaaggtgaagttcaggtgatagaactcataaataacttctttcttaagtctgcgcttctacttgagcagtccaaggtagcacataactttgatacggaggaggcgctgagggatgggaatcatttgtttaacattgaaactcgcggcgaccctctgttggaggctcagatccagccctggatcacgtttgatggagtgaagacaatgccgccattagtaatagaaacgtacttggatctacgagctttgcaacccaaccatatggtgtatcttcatgacgcggatggtaatccatggatggtttgtaaagggggcaagaaaactgagattgtactggaaagatggcttgtagaacttgataagcagacgatagatgactccatcgattcaaatgatcctgaaaacttgcataaacaattggtattgttgttccgctacttgtacacgcttacccaactcttacctgccaacgacatcattaccaagccacacaattcacaacagcccgcacttataaatgttcaaactagactacttgacggttctaagcctattctctctaaggggagggtcggtttaagtaaacctattattgcatcatattccaacacaatgaatgaaacaaacattgcttcacatctagaacaacgaaagattacaccgataaaaactacatttggctcgttgcgtatcacggtgtcttatagaaaagatgtcgacttttatgttattgattcagatgatttacaaaaacgatacatgacaccatccttatctaatgaaactaccacggtacctgatagaagggcttcatccaattgtagcagatctatgtcagtttcccccaagacaaataccatcaatgcgacgctttttcccctagaaggttcatcggcaagaaggcaatccatctcttctaaactgcaaccttttaaagttggatcagttgggagtggctcgtttgtacagagtggcagtgcccagtcgactacgagtcttgttccaagtttatcaaggaatgtttcgagttcatcagtggttgctgcgttgaaagttcaacgtggtagtgccgggtctactatagtaaatggtgatgtaccaccagaactttctagtgttggtagcggatcgaaatattcttcatcttttggcaggatccgccgtcattctagtattagaagatcagaaagttttgacaggaccgctaaaccaaggaaatccactgaaaacccaccggaagatttgttagagtttgtgaaactcttggaagacaagaaagagttgaacatgaaacctaatacaatattgccgcaacaagatatctcaaactcattgatgcgatttcagtccatgaaaagtaataacgatgctcttagcgataacctttcgatgagtatgtccatcgaccagcctaatgttaggtttggctcaaattcacattctccaataccttcattttcaccaaattatggttccattccctccaggctatctcaaggtagtagaaacaatagtaatgcggaattgattaccagcaggaaaagctcattggatagacacaagcataatctattgagcagaactggaagcaacgttgacataaacaggagaggttctgtaggaactatggaaacgactaatgaagattctaaagaggacgaacagtctcacatgaaaggaatgcacttcagcaatgaagcaaccataaataaagatgacgatgaggatgaaatgttaatgaaacgttcatttaacgctggaacatctactactgagcaggttatggggtcgcccagatctataagaagtatttctgtaagttcttacccaagaaaccagcttccattgaaacatctcaacctctctcaccctacaacatcggctaccactacccatgcaaaatttcataagagtgaaatgagccccgacccactgcacacagaaggagcacaaccgcatactagctcgcaacatcataatagctctcaaaaaaatgatgaagatgatgatttgttatttgttatgagtgatatgaatctaaccaactaa

SEQ ID NO: 4789 - protein, 684 aa, Kluyveromyces lactis
MSEGEVQVIELINNFFLKSALLLEQSKVAHNFDTEEALRDGNHLFNIETRGDPLLEAQIQPWITFDGVKTMPPLVIETYLDLRALQPNHMVYLHDADGNPWMVCKGGKKTEIVLERWLVELDKQTIDDSIDSNDPENLHKQLVLLFRYLYTLTQLLPANDIITKPHNSQQPALINVQTRLLDGSKPILSKGRVGLSKPIIASYSNTMNETNIASHLEQRKITPIKTTFGSLRITVSYRKDVDFYVIDSDDLQKRYMTPSLSNETTTVPDRRASSNCSRSMSVSPKTNTINATLFPLEGSSARRQSISSKLQPFKVGSVGSGSFVQSGSAQSTTSLVPSLSRNVSSSSVVAALKVQRGSAGSTIVNGDVPPELSSVGSGSKYSSSFGRIRRHSSIRRSESFDRTAKPRKSTENPPEDLLEFVKLLEDKKELNMKPNTILPQQDISNSLMRFQSMKSNNDALSDNLSMSMSIDQPNVRFGSNSHSPIPSFSPNYGSIPSRLSQGSRNNSNAELITSRKSSLDRHKHNLLSRTGSNVDINRRGSVGTMETTNEDSKEDEQSHMKGMHFSNEATINKDDDEDEMLMKRSFNAGTSTTEQVMGSPRSIRSISVSSYPRNQLPLKHLNLSHPTTSATTTHAKFHKSEMSPDPLHTEGAQPHTSSQHHNSSQKNDEDDDLLFVMSDMNLTN

SEQ ID NO: 4790 - DNA, 2340 bp, Pichia stipitis
  CDS (1)..(2340): transl_table=12
atggcttcccaagatatcctgtaccagtacaaactgcagcaggagcattatcccaacgaaaagatctcagattcatatgttcagaagcaaaactccaagctcactcaagttatccagcaatgtttcagcaaggccgtcaagataatcatccaatcacgaacggttcctccggcagctgcatcgccattgctcaatccagcacttcacgatgattctgccagcggaaacaaaatcaatcgttggttcaatttgcatatccagaactcccaggatcttcccaaagacgatctcaagctctggaagtccaaccacttgcaaagtatgcctcccatgatcatcgagacgtatcttgacttgaggcaattgacctcaagtcaaaccatagttttgaatgatgataacggtaacccgtgggcagtagccaagagcggaggcaagaagcaggaagtggttttagaaagatggttgattgaattcgaccacacagatgctctgggctcgatagtagacgaattacctttgatctacaagcaggccattattttgttccgcagtatctatggttttgctcgtctaatgcctgctttcaagttgaaaaagagactcttgatcaacaaatcaagcaccaagttaaacaaattgactataggcaacaaaattttggatggaaaacagcccatcagctctaagggaagaattggcttatccaagacgataatcccacgtcaaatgctcactactgactctcatatgagtcaaaagcatttccagcccattcaaaccagcttagggactttaaagatatccatagcctatagaaaccactgcgatttctgtattcacgacaacgaagaggtgctttctactcatttcataagcatggattcaactcccttgactgaatcgggacatggccatactaaggctaacaatacttcaatgtctgtctcaccttgttcttcgggacatcctgctttgagagagggttctcctacgaagaggggaacacctccaacggcgattcaaccattcaaggttggctctattagtaattctcctcctccagcatcacatacgccaaatagcggctatggaggatcgttggaaaggcggatttctattacaagcaacagatcgacttcaaatgcttctttgtttgcaatgttgagaaaccctagaagtagtacatcgtcaacacataccacttctaatatcccgatagcaccgagctcgtcgagtaatagcactaatgccacgaacatgaataacatgtcgtatcctcgctctatttcttcttcgcacggttcaaacatgcaacatgacgatagcatgttttcaaatccagacagtaccaccaatacgccgcgcttttcgtcttcgtttggctcgcgtgccagcagaaggtactccaatactagtgtaagacaaagtactcctgtagctgctagcacattaactggtggaagtcccttgagtggactttatattgatgatgatatcagtgagtttgttcgtctgattgatagtaaagcagatcttcgtttctctaattcgtataccgctcataacagcggtgaacccaagaacaatatgggttctccaagtggaggtgacgctttaaacaagttccagatgatgaagagtcaccaccaacaattaggtgacagcgtaaatgccagcttaattttgcagcataacaatgcagtcagtggttctggcagtggatttggcgtaagcaattccagacactccagcacaagtcgtaagagctcccattctatacgttcgccttctccttcgatgtctgggctttatgatgtagttcctggcagctatgggagatctgagagaaggtcttcttcgggagctggtgttcctggtcagctttcattaccttctggtggtggtttggctgcacattctccgtcggccacagaacctacttctgctgcgacgataacgccgcgcgaaacgaattttaacttttccaatgcatcatttcttcgatcggcaagcaagctttctgcaacccctgtcacttctacaactacagcgcatgctacaatccatctggtgactggtatggctacttcaccttctttataccaacgtacgaaggttggatcgtctattcactatgaaaatgtgtttgaagatgacgacgacgacgagatggttatgaaaaaaccagtcgtcacctcttccggcagagatgaagaacagctacaacacaaacaaatgaaagtggtaagtatagaaaaagatgcaggtgcaaataatttcgacgacgatgacttgctatttactatgagcgatatgaaccttaccaaaagttcatag

SEQ ID NO: 4791 - protein, 779 aa, Pichia stipitis
MASQDISYQYKSQQEHYPNEKISDSYVQKQNSKLTQVIQQCFSKAVKIIIQSRTVPPAAASPLLNPALHDDSASGNKINRWFNLHIQNSQDLPKDDLKLWKSNHLQSMPPMIIETYLDLRQLTSSQTIVLNDDNGNPWAVAKSGGKKQEVVLERWLIEFDHTDASGSIVDELPLIYKQAIILFRSIYGFARLMPAFKLKKRLLINKSSTKLNKLTIGNKILDGKQPISSKGRIGLSKTIIPRQMLTTDSHMSQKHFQPIQTSLGTLKISIAYRNHCDFCIHDNEEVLSTHFISMDSTPLTESGHGHTKANNTSMSVSPCSSGHPALREGSPTKRGTPPTAIQPFKVGSISNSPPPASHTPNSGYGGSLERRISITSNRSTSNASLFAMLRNPRSSTSSTHTTSNIPIAPSSSSNSTNATNMNNMSYPRSISSSHGSNMQHDDSMFSNPDSTTNTPRFSSSFGSRASRRYSNTSVRQSTPVAASTLTGGSPLSGLYIDDDISEFVRSIDSKADLRFSNSYTAHNSGEPKNNMGSPSGGDALNKFQMMKSHHQQLGDSVNASLILQHNNAVSGSGSGFGVSNSRHSSTSRKSSHSIRSPSPSMSGLYDVVPGSYGRSERRSSSGAGVPGQLSLPSGGGLAAHSPSATEPTSAATITPRETNFNFSNASFLRSASKLSATPVTSTTTAHATIHSVTGMATSPSLYQRTKVGSSIHYENVFEDDDDDEMVMKKPVVTSSGRDEEQLQHKQMKVVSIEKDAGANNFDDDDLLFTMSDMNLTKSS

SEQ ID NO: 4792 - DNA, 23 bp, Artificial sequence
  primer
atggttgccgaagaggacatcga

SEQ ID NO: 4793 - DNA, 27 bp, Artificial sequence
  primer
ttaaccttctttagaaaggttcatatc

SEQ ID NO: 4794 - protein, 886 aa, Artificial sequence
  consensus sequence
  Variant (2)..(3): Xaa in position 2 to 3 is any amino acid
  Variant (6)..(6): Xaa in position 6 is any amino acid
  Variant (8)..(29): Xaa in position 8 to 29 is any amino acid
  Variant (30)..(46): Xaa in position 30 to 46 is any or no amino acid
  Variant (48)..(63): Xaa in position 48 to 63 is any amino acid
  Variant (64)..(64): Xaa in position 64 is any or no amino acid
  Variant (66)..(73): Xaa in position 66 to 73 is any amino acid
  Variant (74)..(74): Xaa in position 74 is any or no amino acid
  Variant (77)..(78): Xaa in position 77 to 78 is any amino acid
  Variant (81)..(82): Xaa in position 81 to 82 is any amino acid
  Variant (87)..(87): Xaa in position 87 is any amino acid
  Variant (89)..(95): Xaa in position 89 to 95 is any amino acid
  Variant (97)..(97): Xaa in position 97 is any amino acid
  Variant (99)..(103): Xaa in position 99 to 103 is any amino acid
  Variant (105)..(105): Xaa in position 105 is any amino acid
  Variant (107)..(107): Xaa in position 107 is any amino acid
  Variant (109)..(109): Xaa in position 109 is any amino acid
  Variant (111)..(111): Xaa in position 111 is any amino acid
  Variant (114)..(114): Xaa in position 114 is any amino acid
  Variant (116)..(116): Xaa in position 116 is any amino acid
  Variant (123)..(123): Xaa in position 123 is any amino acid
  Variant (125)..(125): Xaa in position 125 is any amino acid
  Variant (127)..(142): Xaa in position 127 to 142 is any amino acid
  Variant (143)..(148): Xaa in position 143 to 148 is any or no amino acid
  Variant (151)..(153): Xaa in position 151 to 153 is any amino acid
  Variant (157)..(163): Xaa in position 157 to 163 is any amino acid
  Variant (165)..(165): Xaa in position 165 is any amino acid
  Variant (167)..(184): Xaa in position 167 to 184 is any amino acid
  Variant (185)..(203): Xaa in position 185 to 203 is any or no amino acid
  Variant (207)..(208): Xaa in position 207 to 208 is any amino acid
  Variant (211)..(211): Xaa in position 211 is any amino acid
  Variant (216)..(216): Xaa in position 216 is any amino acid
  Variant (220)..(221): Xaa in position 220 to 221 is any amino acid
  Variant (224)..(230): Xaa in position 224 to 230 is any amino acid
  Variant (231)..(237): Xaa in position 231 to 237 is any or no amino acid
  Variant (239)..(240): Xaa in position 239 to 240 is any amino acid
  Variant (243)..(245): Xaa in position 243 to 245 is any amino acid
  Variant (247)..(248): Xaa in position 247 to 248 is any amino acid
  Variant (250)..(251): Xaa in position 250 to 251 is any amino acid
  Variant (253)..(253): Xaa in position 253 is any amino acid
  Variant (255)..(255): Xaa in position 255 is any amino acid
  Variant (257)..(259): Xaa in position 257 to 259 is any amino acid
  Variant (262)..(265): Xaa in position 262 to 265 is any amino acid
  Variant (267)..(291): Xaa in position 267 to 291 is any amino acid
  Variant (292)..(363): Xaa in position 292 to 363 is any or no amino acid
  Variant (365)..(365): Xaa in position 365 is any amino acid
  Variant (367)..(367): Xaa in position 367 is any amino acid
  Variant (370)..(392): Xaa in position 370 to 392 is any amino acid
  Variant (393)..(401): Xaa in position 393 to 401 is any or no amino acid
  Variant (409)..(418): Xaa in position 409 to 418 is any amino acid
  Variant (419)..(451): Xaa in position 419 to 451 is any or no amino acid
  Variant (453)..(454): Xaa in position 453 to 454 is any amino acid
  Variant (456)..(489): Xaa in position 456 to 489 is any amino acid
  Variant (490)..(529): Xaa in position 490 to 529 is any or no amino acid
  Variant (534)..(535): Xaa in position 534 to 535 is any amino acid
  Variant (536)..(537): Xaa in position 536 to 537 is any or no amino acid
  Variant (540)..(540): Xaa in position 540 is any amino acid
  Variant (542)..(564): Xaa in position 542 to 564 is any amino acid
  Variant (565)..(581): Xaa in position 565 to 581 is any or no amino acid
  Variant (583)..(585): Xaa in position 583 to 585 is any amino acid
  Variant (588)..(592): Xaa in position 588 to 592 is any amino acid
  Variant (594)..(595): Xaa in position 594 to 595 is any amino acid
  Variant (597)..(611): Xaa in position 597 to 611 is any amino acid
  Variant (612)..(623): Xaa in position 612 to 623 is any or no amino acid
  Variant (625)..(627): Xaa in position 625 to 627 is any amino acid
  Variant (629)..(636): Xaa in position 629 to 636 is any amino acid
  Variant (639)..(643): Xaa in position 639 to 643 is any amino acid
  Variant (645)..(659): Xaa in position 645 to 659 is any amino acid
  Variant (660)..(684): Xaa in position 660 to 684 is any or no amino acid
  Variant (687)..(687): Xaa in position 687 is any amino acid
  Variant (690)..(697): Xaa in position 690 to 697 is any amino acid
  Variant (698)..(703): Xaa in position 698 to 703 is any or no amino acid
  Variant (705)..(846): Xaa in position 705 to 846 is any amino acid
  Variant (847)..(873): Xaa in position 847 to 873 is any or no amino acid
  Variant (878)..(878): Xaa in position 878 is any amino acid
  Variant (880)..(880): Xaa in position 880 is any amino acid
IXXFFXKXXXXXXXXXXXXXXXXXXXXXXXXXXXXXXXXXXXXXXXFXXXXXXXXXXXXXXXXXWXXXXXXXXXPPXXIEXXLDLRXLXXXXXXXLXDXXXXXWXVXKXGXKKXEXVLERWLXEXDXXXXXXXXXXXXXXXXXXXXXXKQXXXLFRXXXXXXXLXPXXXXXXXXXXXXXXXXXXXXXXXXXXXXXXXXXXXXXLDGXXPIXSKGRXGLSXXIIXXXXXXXXXXXXXXHXXQKXXXPXXTXXGXLXIXXXYRXXXXFXXXXXXXXXXXXXXXXXXXXXXXXXXXXXXXXXXXXXXXXXXXXXXXXXXXXXXXXXXXXXXXXXXXXXXXXXXXXXXXXXXXXXXXXXXXXXXXXXSXSXSPXXXXXXXXXXXXXXXXXXXXXXXXXXXXXXXXQPFKVGSXXXXXXXXXXXXXXXXXXXXXXXXXXXXXXXXXXXXXXXXXXXSXXSXXXXXXXXXXXXXXXXXXXXXXXXXXXXXXXXXXXXXXXXXXXXXXXXXXXXXXXXXXXXXXXXXXXXXXXXXXSSFGXXXXRRXSXXXXXXXXXXXXXXXXXXXXXXXXXXXXXXXXXXXXXXXXDXXXFVXXXXXKXXLXXXXXXXXXXXXXXXXXXXXXXXXXXXLXXXQXXXXXXXXLSXXXXXSXXXXXXXXXXXXXXXXXXXXXXXXXXXXXXXXXXXXXXXXSPXPSXXXXXXXXXXXXXXSXXXXXXXXXXXXXXXXXXXXXXXXXXXXXXXXXXXXXXXXXXXXXXXXXXXXXXXXXXXXXXXXXXXXXXXXXXXXXXXXXXXXXXXXXXXXXXXXXXXXXXXXXXXXXXXXXXXXXXXXXXXXXXXXXXXXXXXXXXXXXXXXXXXXXXXXXXXXXXXXXXXXXXXXXDDDLXFXMSDMNL

SEQ ID NO: 4795 - protein, 42 aa, Artificial sequence
  protein pattern
  Variant (3)..(3): Xaa in position 3 is Leu or Met
  Variant (4)..(5): Xaa in position 4 to 5 is Ile or Val
  Variant (7)..(7): Xaa in position 7 is any amino acid
  Variant (8)..(8): Xaa in position 8 is Phe or Tyr
  Variant (9)..(9): Xaa in position 9 is Ile or Leu
  Variant (13)..(13): Xaa in position 13 is any amino acid
  Variant (15)..(19): Xaa in position 15 to 19 is any amino acid
  Variant (20)..(20): Xaa in position 20 is any or no amino acid
  Variant (22)..(22): Xaa in position 22 is any or no amino acid
  Variant (24)..(24): Xaa in position 24 is any amino acid
  Variant (26)..(26): Xaa in position 26 is any amino acid
  Variant (27)..(27): Xaa in position 27 is Asp, Glu or Asn
  Variant (28)..(29): Xaa in position 28 to 29 is any amino acid
  Variant (30)..(30): Xaa in position 30 is Leu or Pro
  Variant (32)..(32): Xaa in position 32 is any amino acid
  Variant (34)..(34): Xaa in position 34 is Ala or Cys
  Variant (36)..(37): Xaa in position 36 to 37 is any amino acid
  Variant (38)..(38): Xaa in position 38 is any or no amino acid
  Variant (41)..(41): Xaa in position 41 is any amino acid
PPXXXEXXXDLRXLXXXXXXVXLXDXXXXXWXVXKXXXKKXE

SEQ ID NO: 4796 - protein, 34 aa, Artificial sequence
  protein pattern
  Variant (2)..(2): Xaa in position 2 is Leu or Met
  Variant (3)..(3): Xaa in position 3 is Asp, Glu, Ser or Thr
  Variant (5)..(5): Xaa in position 5 is any or no amino acid
  Variant (7)..(8): Xaa in position 7 to 8 is any amino acid
  Variant (9)..(9): Xaa in position 9 is any or no amino acid
  Variant (11)..(11): Xaa in position 11 is Ile or Val
  Variant (12)..(12): Xaa in position 12 is any amino acid
  Variant (14)..(15): Xaa in position 14 to 15 is any amino acid
  Variant (17)..(17): Xaa in position 17 is any amino acid
  Variant (19)..(19): Xaa in position 19 is Lys or Arg
  Variant (20)..(20): Xaa in position 20 is Ile or Val
  Variant (21)..(21): Xaa in position 21 is Ser or Thr
  Variant (22)..(22): Xaa in position 22 is Ile or Val
  Variant (23)..(23): Xaa in position 23 is Ala or Ser
  Variant (26)..(26): Xaa in position 26 is any amino acid
  Variant (27)..(27): Xaa in position 27 is Asp or His
  Variant (28)..(29): Xaa in position 28 to 29 is any amino acid
  Variant (31)..(31): Xaa in position 31 is any amino acid
  Variant (32)..(32): Xaa in position 32 is Phe, Ile, Leu or Val
  Variant (33)..(33): Xaa in position 33 is any amino acid
  Variant (34)..(34): Xaa in position 34 is Asp, Glu or Asn
HXXQXKXXXPXXTXXGXLXXXXXYRXXXXFXXXX

SEQ ID NO: 4797 - protein, 20 aa, Artificial sequence
  protein pattern
  Variant (4)..(5): Xaa in position 4 to 5 is any amino acid
  Variant (8)..(8): Xaa in position 8 is any or no amino acid
  Variant (10)..(10): Xaa in position 10 is any or no amino acid
  Variant (14)..(14): Xaa in position 14 is Ile or Val
  Variant (18)..(18): Xaa in position 18 is Lys or Arg
  Variant (19)..(19): Xaa in position 19 is Pro or Ser
LDGXXPIXSXKGRXGLSXXI

SEQ ID NO: 4798 - protein, 26 aa, Artificial sequence
  protein pattern
  Variant (3)..(3): Xaa in position 3 is Ala or Leu
  Variant (4)..(4): Xaa in position 4 is Ile or Val
  Variant (5)..(5): Xaa in position 5 is Ile, Leu or Val
  Variant (9)..(9): Xaa in position 9 is any amino acid
  Variant (10)..(10): Xaa in position 10 is Ile or Leu
  Variant (11)..(11): Xaa in position 11 is any amino acid
  Variant (12)..(12): Xaa in position 12 is Gly or Thr
  Variant (13)..(14): Xaa in position 13 to 14 is any amino acid
  Variant (15)..(15): Xaa in position 15 is Gln or Arg
  Variant (17)..(17): Xaa in position 17 is Leu or Met
  Variant (19)..(19): Xaa in position 19 is Ala or Thr
  Variant (20)..(20): Xaa in position 20 is any amino acid
  Variant (21)..(21): Xaa in position 21 is Asp, Glu or Lys
  Variant (22)..(22): Xaa in position 22 is Ile, Leu or Val
  Variant (23)..(25): Xaa in position 23 to 25 is any amino acid
  Variant (26)..(26): Xaa in position 26 is Leu or Pro
KQXXXLFRXXXXXXXLXPXXXXXXXX

SEQ ID NO: 4799 - protein, 15 aa, Artificial sequence
  protein pattern
  Variant (2)..(2): Xaa in position 2 is Asp, Glu or Gln
  Variant (5)..(5): Xaa in position 5 is any or no amino acid
  Variant (7)..(7): Xaa in position 7 is Leu or Val
  Variant (9)..(9): Xaa in position 9 is any amino acid
DXDDXLXFXMSDMNL

SEQ ID NO: 4800 - protein, 10 aa, Artificial sequence
  protein pattern
  Variant (2)..(2): Xaa in position 2 is Leu or Met
  Variant (7)..(7): Xaa in position 7 is Ile or Val
  Variant (9)..(9): Xaa in position 9 is Phe or Leu
  Variant (10)..(10): Xaa in position 10 is Asp or Glu
VXERWLXEXX

SEQ ID NO: 4801 - protein, 15 aa, Artificial sequence
  protein pattern
  Variant (2)..(2): Xaa in position 2 is Ile or Leu
  Variant (3)..(3): Xaa in position 3 is any amino acid
  Variant (4)..(4): Xaa in position 4 is Asp or Glu
  Variant (7)..(7): Xaa in position 7 is Lys or Arg
  Variant (8)..(8): Xaa in position 8 is any amino acid
  Variant (9)..(9): Xaa in position 9 is Ile or Leu
  Variant (10)..(10): Xaa in position 10 is Asp or Glu
  Variant (11)..(11): Xaa in position 11 is Ala, Asp, Glu or Ser
  Variant (13)..(13): Xaa in position 13 is any amino acid
  Variant (14)..(14): Xaa in position 14 is Asp or Glu
DXXXFVXXXXXKXXL

SEQ ID NO: 4802 - protein, 25 aa, Artificial sequence
  protein pattern
  Variant (2)..(2): Xaa in position 2 is any amino acid
  Variant (3)..(3): Xaa in position 3 is Lys or Arg
  Variant (4)..(4): Xaa in position 4 is Phe or Tyr
  Variant (6)..(6): Xaa in position 6 is any amino acid
  Variant (7)..(7): Xaa in position 7 is Leu or Met
  Variant (8)..(8): Xaa in position 8 is Lys or Arg
  Variant (9)..(9): Xaa in position 9 is Asn, Pro or Ser
  Variant (10)..(11): Xaa in position 10 to 11 is any amino acid
  Variant (12)..(12): Xaa in position 12 is Asp or Gln
  Variant (13)..(13): Xaa in position 13 is any amino acid
  Variant (15)..(15): Xaa in position 15 is any amino acid
  Variant (16)..(16): Xaa in position 16 is any or no amino acid
  Variant (18)..(19): Xaa in position 18 to 19 is any or no amino acid
  Variant (21)..(21): Xaa in position 21 is Met or Val
  Variant (22)..(22): Xaa in position 22 is Asn or Ser
  Variant (23)..(23): Xaa in position 23 is any amino acid
  Variant (25)..(25): Xaa in position 25 is Ile, Leu or Met
LXXXQXXXXXXXXLXXDXXSXXXSX

SEQ ID NO: 4803 - protein, 20 aa, Artificial sequence
  protein pattern
  Variant (2)..(4): Xaa in position 2 to 4 is any or no amino acid
  Variant (6)..(6): Xaa in position 6 is Asp, Gly, Asn or Gln
  Variant (7)..(7): Xaa in position 7 is any amino acid
  Variant (10)..(10): Xaa in position 10 is any amino acid
  Variant (12)..(12): Xaa in position 12 is Ala, Ser or Thr
  Variant (13)..(13): Xaa in position 13 is Ala, Thr or Val
  Variant (14)..(14): Xaa in position 14 is any amino acid
  Variant (15)..(15): Xaa in position 15 is Ile or Leu
  Variant (16)..(16): Xaa in position 16 is Ile, Leu or Val
  Variant (17)..(17): Xaa in position 17 is any amino acid
  Variant (18)..(18): Xaa in position 18 is Glu, Gln, Ser or Thr
  Variant (19)..(19): Xaa in position 19 is any amino acid
  Variant (20)..(20): Xaa in position 20 is Glu, Lys or Arg
LXXXIXXFFXKXXXXXXXXX

SEQ ID NO: 4804 - DNA, 996 bp, Arabidopsis thaliana
  CDS (1)..(996)
atgacggcaattccaaacgtcgtcgatattgaatcttcttcctcttcgctttgtcaagagacggcaacggagaccgtcaccgttgaaagaggctcgtctgattcatcttcaaagccagacgacgtcgttttactaatcaaggaagaggaggatgacgccgttaacttgtcacttggtttttggaaattgcacgagataggtttaataacaccgttcttgagaaagacgtttgagatcgtcgatgacaaagtaacagacccggttgtatcatggagcccgacccgtaaaagctttatcatttgggattcttacgagttctcagagaatctacttcccaaatacttcaagcacaagaacttctccagttttattcgtcagcttaactcttacggttttaaaaaggtcgattcagataggtgggaatttgctaacgaagggtttcaaggagggaagaaacatttgcttaagaacatcaagaggagaagcaaaaacactaaatgttgtaacaaggaagcgagtaccaccacgacagagactgaggttgagtcattgaaggaggaacagagtccaatgagattggagatgttgaagctgaaacaacaacaagaagaatctcaacatcagatggtcactgtgcaggagaagatccacggagttgataccgaacaacagcatatgcttagtttctttgcaaagttggctaaagatcaaagatttgtagagagactggtgaagaagagaaagatgaaaatacagagagagctagaagcagctgaattcgtgaagaagctcaagttgcttcaggatcaagaaactcaaaagaacttgttagatgtagaaagagaatttatggccatggctgcaacagaacacaatcccgagcctgacattttggtgaacaatcaaagcgggaatacgagatgtcagcttaactcagaggacctacttgttgacggtggctcaatggatgtaaatgggaggatagagatagagtag

SEQ ID NO: 4805 - protein, 331 aa, Arabidopsis thaliana
MTAIPNVVDIESSSSSLCQETATETVTVERGSSDSSSKPDDVVLLIKEEEDDAVNLSLGFWKLHEIGLITPFLRKTFEIVDDKVTDPVVSWSPTRKSFIIWDSYEFSENLLPKYFKHKNFSSFIRQLNSYGFKKVDSDRWEFANEGFQGGKKHLLKNIKRRSKNTKCCNKEASTTTTETEVESLKEEQSPMRLEMLKLKQQQEESQHQMVTVQEKIHGVDTEQQHMLSFFAKLAKDQRFVERLVKKRKMKIQRELEAAEFVKKLKLLQDQETQKNLLDVEREFMAMAATEHNPEPDILVNNQSGNTRCQLNSEDLLVDGGSMDVNGRIEIE

SEQ ID NO: 4806 - DNA, 1131 bp, Oryza sativa
  CDS (1)..(1131)
atgaatccattgcgcgtcatcgtgaaagaggaggagctcgacttcgccgccgcggcggcggcggcggcggcgggtgagggctcgccgtcgtcgtgggcggtcggcgtgatggacctgcctcgtccaatggagggcctcggcgaggccgggccgccgccgttcttgtgcaagacgtacgaggtcgtggacgaccccggcacggacaccgtcatctcgtgggggttcgccggcaacagcttcgtcgtctgggacgccaatgcgttcgccgccgtgctcctcccgcgctacttcaagcacagcaacttctccagcttcgtccgccagctcaacacctacgggttcaggaaggtcgatccggatagatgggagttcgcgaacgaggggttcttgcgggggaagaaggagctcctgaagacgatcaagcgacgccggccgccgccgtcgagccccccgtcgtcttcgtcgtcgtcgtcgtcgtcgcagcaccagcagcagccggcggcggcgtgcctggaggtggggcagttcgggcgcgacggcgtggtgaaccggctgcagcgcgacaagagcgtcctgatcgcggaggtggtgaagctgcggcaggagcagcagacgacgcgcgcgcagatgcaggcgatggaggagcgcatctcggcggcggagcagaagcagcagcagatgacggtgttcctggcgcgcgccatgaagaacccgggcttcctccagatgctcgtcgaccggcaggccggccagcacggcgcccggaacagggtgctcgaggacgccctctccaagaagcgccgccgccccatcgagtacctcctcacccgcaacggcgagacctgcgccgccggcgagtcggcagctatgctggcggcggacggcgtggcggagccggacggcgacaccaccccgcgcggcgacggcggcggcggcggcggcggcgacaccgagagcttctggatgcagctgctcagcctcggcctggaggagaagcagcgagaggacggcgtcgccggcggcgtccaggagagtaacagcggcggcgctgacgtggacaacgacgaggaggatgacgacgatgacgtggacgtgctcgtgcagagcatatatcacctcagccccaagtga

SEQ ID NO: 4807 - protein, 376 aa, Oryza sativa
MNPLRVIVKEEELDFAAAAAAAAAGEGSPSSWAVGVMDLPRPMEGLGEAGPPPFLCKTYEVVDDPGTDTVISWGFAGNSFVVWDANAFAAVLLPRYFKHSNFSSFVRQLNTYGFRKVDPDRWEFANEGFLRGKKELLKTIKRRRPPPSSPPSSSSSSSSSQHQQQPAAACLEVGQFGRDGVVNRLQRDKSVLIAEVVKLRQEQQTTRAQMQAMEERISAAEQKQQQMTVFLARAMKNPGFLQMLVDRQAGQHGARNRVLEDALSKKRRRPIEYLLTRNGETCAAGESAAMLAADGVAEPDGDTTPRGDGGGGGGGDTESFWMQLLSLGLEEKQREDGVAGGVQESNSGGADVDNDEEDDDDDVDVLVQSIYHLSPK

SEQ ID NO: 4808 - DNA, 1032 bp, Glycine max
  CDS (1)..(1032)
atggatgacggcgccgctaactggtcttcgtcgtcgtcgacttcgcccaaaccgatggaagggttgcacgaggtgggcccccctccgttcctgaagaagacgtttgaaatggtggaggaccctcacaccaaccccattgtgtcgtggagccaaactcgccatagtttcgtcgtttgggactcgcacgagttctccaaaacccttctcccaaagtacttcaagcacagtaatttctcaagcttcgttcgccagctcaacacctatggctttaggaaggttgattcggaccgttgggagtttgcgaatgaaggattccaaggagggaagaagcatttgctgaagaacataaggaggaggagtaagtgcaacaaactgcatcagggagcattcaatatgatgaagccagacgtggattctgaagtggagaagctgaagaaagaccagaacattttgaaggtggagattctgaagctgaggcagcagcaggaaaattctcatgttcagctcacaaatgttcaggagagaattcggtgtgcagagatgaagcagtttcagatgatgtatttcctcaccagaatggctagaaggcctgcgtttgttgagcagttagtccataagattaggcgaaaaagagagattgatggtaatgacatgacaatggaaacaacacctaattttgattatagacaccaacaaggtcataaacaatttgcaacattgcaatctgagctcaatgtgacagaagtgaactccagtaggatggagcacccaactccctctcctttagaagatgaattaggcaactctttgcaagggttaagggctcatggttgttctagagcaagggcacaagatgcatcttcttctgcctatcatgttatgtcagaaaaactaatgagagaaaattctatagttgatgaagaactagatgtgaatgactccaatatctatcttgaattagaggatttgattactaagcctacagattggtctgttggatctgcaagtggattggtggaacaaactagttga

SEQ ID NO: 4809 - protein, 343 aa, Glycine max
MDDGAANWSSSSSTSPKPMEGLHEVGPPPFLKKTFEMVEDPHTNPIVSWSQTRHSFVVWDSHEFSKTLLPKYFKHSNFSSFVRQLNTYGFRKVDSDRWEFANEGFQGGKKHLLKNIRRRSKCNKLHQGAFNMMKPDVDSEVEKLKKDQNILKVEILKLRQQQENSHVQLTNVQERIRCAEMKQFQMMYFLTRMARRPAFVEQLVHKIRRKREIDGNDMTMETTPNFDYRHQQGHKQFATLQSELNVTEVNSSRMEHPTPSPLEDELGNSLQGLRAHGCSRARAQDASSSAYHVMSEKLMRENSIVDEELDVNDSNIYLELEDLITKPTDWSVGSASGLVEQTS

SEQ ID NO: 4810 - DNA, 1089 bp, Glycine max
  CDS (1)..(1089)
atggagagaattagagtgaaggaggaagaagcagtgacatgtggtggtggttcatcatcatcatcatcttcgtcttcaagcttttctccacagcctatggaagggttgcacgaggtgggtccccctccgtttctgagcaagatctttgacatggtagaagattcttccacggactccattgtgtcatggagcatggctcgcaacagctttgtggtgtgggattctcacaagttttctgctgacattctgcctcgttacttcaagcacggcaatttctccagcttcattcgccagctcaacgcctatgggtttaggaaagttgatcctgatagatgggaatttgcaaacgaaggttttttggcaggacaaaggcacttattgaagaccattaagagaagaagaaatgtgtcacagagtttgcaacaaaaaggaggaagtggagcttgtgttgaagtgggggagtttggactcgaaggtgagttggagaggttgaaaagagacaggaacattttgatggcagaaattgtgagattgaggcaccaacaactgaactcaagggaacaattgaattccatggagaccagattgcaagccactgagaagaaacagcagcaaatgatgagtttccttgcaaaagcactgagtaacccatctttcacgaaacaattagtccaaaagaccccccaaagcagagaagtgttgggtgttgaaatcaataggaaaaggagactgactgctagtccaagtgttgagaacttgcaacaagatgatcaagatttggcaactttggattatccaagccatgatcgagatttggcaactatggagactgatatggacacttttttctcaccggcttatgataatgaacttagcagtgaaaccaatgagcctgcatcaatttcggttgaggatacaatcttggaggactttctcaacaaagacttggttacttggaatccggaggatgaagttataattggggatagttcccaagtcgatgtgccggtggaggatttggttgcaaaccctgatgattggagtgagcaattgcaggaccttgtggatcatatggactatctaggctaa

SEQ ID NO: 4811 - protein, 362 aa, Glycine max
MERIRVKEEEAVTCGGGSSSSSSSSSSFSPQPMEGLHEVGPPPFLSKIFDMVEDSSTDSIVSWSMARNSFVVWDSHKFSADILPRYFKHGNFSSFIRQLNAYGFRKVDPDRWEFANEGFLAGQRHLLKTIKRRRNVSQSLQQKGGSGACVEVGEFGLEGELERLKRDRNILMAEIVRLRHQQLNSREQLNSMETRLQATEKKQQQMMSFLAKALSNPSFTKQLVQKTPQSREVLGVEINRKRRLTASPSVENLQQDDQDLATLDYPSHDRDLATMETDMDTFFSPAYDNELSSETNEPASISVEDTILEDFLNKDLVTWNPEDEVIIGDSSQVDVPVEDLVANPDDWSEQLQDLVDHMDYLG

SEQ ID NO: 4812 - DNA, 1038 bp, Arabidopsis thaliana
  CDS (1)..(1038)
atggaagaactgaaagtggaaatggaggaagaaacggtgacgtttactggttctgtagcggcttcttcatctgtaggatcctcttcctctcctagaccaatggaagggcttaacgaaacagggccaccaccgtttctgactaagacttacgaaatggtggaagatccggcgacggacacggtggtttcttggagtaatggtcgtaacagctttgtggtgtgggattctcataagttctcaacaactctccttccacgttacttcaagcatagcaatttctcaagttttattcgtcagctcaatacttatggattcagaaagattgatccagatagatgggaatttgcaaatgaagggtttttagcaggacaaaagcatctcttgaagaacatcaaaagaaggaggaacatgggtttgcagaatgtgaatcagcaaggatctgggatgtcatgtgttgaggttgggcaatacggtttcgacggggaggttgagaggttgaagagggatcatggtgtgcttgtagctgaggtagttaggttgaggcaacagcaacacagctccaagagtcaagttgcagctatggagcaacggttgcttgttactgagaagagacagcagcagatgatgacgttccttgccaaggcgttgaacaatccgaactttgttcagcagtttgcggttatgagtaaagagaagaagagtttgtttggtttggatgtggggaggaaacggaggcttacttctactccaagcttggggactatggaggagaatttgttacatgatcaagagtttgatagaatgaaggatgatatggaaatgttgttcgctgcagcaatcgatgatgaggcgaataattcgatgcctactaaggaggaacaatgtttggaggctatgaatgtgatgatgagagatggtaatttggaagcagcgttggatgtgaaagtggaagatttggttggttcgcctttggattgggacagccaagatctacatgacatggttgatcaaatgggttttcttggttcggaaccttaa

SEQ ID NO: 4813 - protein, 345 aa, Arabidopsis thaliana
MEELKVEMEEETVTFTGSVAASSSVGSSSSPRPMEGLNETGPPPFLTKTYEMVEDPATDTVVSWSNGRNSFVVWDSHKFSTTLLPRYFKHSNFSSFIRQLNTYGFRKIDPDRWEFANEGFLAGQKHLLKNIKRRRNMGLQNVNQQGSGMSCVEVGQYGFDGEVERLKRDHGVLVAEVVRLRQQQHSSKSQVAAMEQRLLVTEKRQQQMMTFLAKALNNPNFVQQFAVMSKEKKSLFGLDVGRKRRLTSTPSLGTMEENLLHDQEFDRMKDDMEMLFAAAIDDEANNSMPTKEEQCLEAMNVMMRDGNLEAALDVKVEDLVGSPLDWDSQDLHDMVDQMGFLGSEP

SEQ ID NO: 4814 - DNA, 1167 bp, Vitis vinifera
  CDS (1)..(1167)
atggacggagtgatggtcaaagaagaagaaccagtggtttcatggactatgggctcatcatcatcatcatcttcttcaccaggctttgctcctcacccattggagggtctgcacgaggtgggtccgcctccatttcttacgaagaccttcgatatggtggaagacccagcaaccgactcagtggtctcgtggagtagagctcgcaacagcttcattgtttgggattcgcacaagttctctactactcttcttcccaggtacttcaagcacagtaacttctccagcttcattcgccagctcaacacatatggttttagaaaagtcgatccagatcgatgggagtttgcaaatgaagggtttttgggagggcagaagcatctgctgaagaacatcaagagaagaagacatgtctcacagaatacacagcaaggaggactaggagcttgtgtggaattagggcaatacggattggaggatgaacttgaaagattgaagagagacagaaacgtattaatggcagagatcgggaagctgcggcagcaacaacagaattccaggaatgaactagttgccatggagggtcgaatgcagaacacagagaagaagcagatgcagatgatgacctttctcgccaaagcattaaacaacccttcctttgtccagcaatttatccagcagagaagggaacttcgaggggctgaaatcgggcgaaaacgacgattaaccaccagtcaaagtgctgagaatttgcaggaagtgataacggtggcaagcatcgaccaagcgttcagctacacaaatcaagatgatggggacatgtcgggtattgaatcagagatagagacatttttctcaggcggctgggacaatgaatcaagtgaagatatcaaggacccgaaagcggattccattgataacaacttgggttctgtcaatgatgtaatctgggaggaactattgagtgatgatctgattgctggcaatgaggaagaagtacccccactccgactgggtgatcatcatgaaccagaaactgatgtggaggtggaggatttggttgcaacgccttcagactggggtgaggacttccaagaccttgtggaccaaatggcttttctcaggccaaacctcagatccagactcgaaagaagggttctcaatctttga

SEQ ID NO: 4815 - protein, 388 aa, Vitis vinifera
MDGVMVKEEEPVVSWTMGSSSSSSSSPGFAPHPLEGLHEVGPPPFLTKTFDMVEDPATDSVVSWSRARNSFIVWDSHKFSTTLLPRYFKHSNFSSFIRQLNTYGFRKVDPDRWEFANEGFLGGQKHLLKNIKRRRHVSQNTQQGGLGACVELGQYGLEDELERLKRDRNVLMAEIGKLRQQQQNSRNELVAMEGRMQNTEKKQMQMMTFLAKALNNPSFVQQFIQQRRELRGAEIGRKRRLTTSQSAENLQEVITVASIDQAFSYTNQDDGDMSGIESEIETFFSGGWDNESSEDIKDPKADSIDNNLGSVNDVIWEELLSDDLIAGNEEEVPPLRLGDHHEPETDVEVEDLVATPSDWGEDFQDLVDQMAFLRPNLRSRLERRVLNL

SEQ ID NO: 4816 - DNA, 1023 bp, Vitis vinifera
  CDS (1)..(1023)
atggagggactacatgaggcaggtccgccgccgtttctgaagaagacgttcgaaatggtggaggacccagaaaccgattcggtagtgtcgtggagcgtggctcgtaacagcttcattgtttgggactcccacaacttttcccagagtcttcttcccaagtacttcaagcacagtaacttctccagcttcattcgccagctcaacacttatggcttcagaaagattgattcagatcgatgggagtttgcaaatgaagcgtttcaaggagggaagagacatctgctgaagaacatcaagaggagaagacatggttgcttgcagcaacaaggatccagatctggtgctgaatcggtgaaactccaattggaagctgaagttgagagtctgagaaaagatcagaacatcttaaatgtcgaaatcttgagaatgagacaacggcaggagacatcacagaatcatctgactgcggtcgaagagcgcatccgaggtgcagagtgtaagcaaaaacagatgttcattttcatggccaaggccgtgaagaaccctagcttcgttcagcagctaatccagaagaggcagaaaagagaactgggtgatggtgaaattgggaagaaacgaaggctggcttcaatgctcagcgttgggagcttgctggaggcaatatttagtaaccaaactgttcactaccgaaaccaaaacctagttcaagaagaaccctcactccaatcagagatccaatcgttgttctgttcaggcatagatgatgaatcaggaggcagtcctcctgaggatcaggaggccaatgtgatatctggaacaggtaatccagatttattatcttttaataatggaatgctggagaaactgatggaggaagatcccatttgccaaaatgaagcagaggagttgctatccgggaaaccttcaattcttgattttgaattggaggagtggattgaaaagcctgttgattggtctgtgtatgtaaaagagctgatggagccgcaatttggttgtgtttga

SEQ ID NO: 4817 - protein, 340 aa, Vitis vinifera
MEGLHEAGPPPFLKKTFEMVEDPETDSVVSWSVARNSFIVWDSHNFSQSLLPKYFKHSNFSSFIRQLNTYGFRKIDSDRWEFANEAFQGGKRHLLKNIKRRRHGCLQQQGSRSGAESVKLQLEAEVESLRKDQNILNVEILRMRQRQETSQNHLTAVEERIRGAECKQKQMFIFMAKAVKNPSFVQQLIQKRQKRELGDGEIGKKRRLASMLSVGSLLEAIFSNQTVHYRNQNLVQEEPSLQSEIQSLFCSGIDDESGGSPPEDQEANVISGTGNPDLLSFNNGMLEKLMEEDPICQNEAEELLSGKPSILDFELEEWIEKPVDWSVYVKELMEPQFGCV

SEQ ID NO: 4818 - DNA, 1086 bp, Vitis vinifera
  CDS (1)..(1086)
atgggctcatcatcatcatcatcttcttcaccaggctttgctcctcacccattggagggtctgcacgaggtgggtccgcctccatttcttacgaagaccttcgatatggtggaagacccagcaaccgactcagtggtctcgtggagtagagctcgcaacagcttcattgtttgggattcgcacaagttctctactactcttcttcccaggtacttcaagcacagtaacttctccagcttcattcgccagctcaacacatatggttttagaaaagtcgatccagatcgatgggagtttgcaaatgaagggtttttgggagggcagaagcatctgctgaagaacatcaagagaagaagacatgtctcacagaatacacagcaaggaggactaggagcttgtgtggaattagggcaatacggattggaggatgaacttgaaagattgaagagagacagaaacgtattaatggcagagatcgggaagctgcggcagcaacaacagaattccaggaatgaactagttgccatggagggtcgaatgcagaacacagagaagaagcagatgcagatgatgacctttctcgccaaagcattaaacaacccttcctttgtccagcaatttatccagcagagaagggaacttcgaggggctgaaatcgggcgaaaacgacgattaaccaccagtcaaagtgctgagaatttgcaggaagtgataacggtggcaagcatcgaccaagcgttcagctacacaaatcaagatgatggggacatgtcgggtattgaatcagagatagagacatttttctcaggcggctgggacaatgaatcaagtgaagatatcaaggacccgaaagcggattccattgataacaacttgggttctgtcaatgatgtaatctgggaggaactattgagtgatgatctgattgctggcaatgaggaagaagtacccccactccgactgggtgatcatcatgaaccagaaactgatgtggaggtggaggatttggttgcaacgccttcagactggggtgaggacttccaagaccttgtggaccaaatggcttttctcaggtccaaatcatga

SEQ ID NO: 4819 - protein, 361 aa, Vitis vinifera
MGSSSSSSSSPGFAPHPLEGLHEVGPPPFLTKTFDMVEDPATDSVVSWSRARNSFIVWDSHKFSTTLLPRYFKHSNFSSFIRQLNTYGFRKVDPDRWEFANEGFLGGQKHLLKNIKRRRHVSQNTQQGGLGACVELGQYGLEDELERLKRDRNVLMAEIGKLRQQQQNSRNELVAMEGRMQNTEKKQMQMMTFLAKALNNPSFVQQFIQQRRELRGAEIGRKRRLTTSQSAENLQEVITVASIDQAFSYTNQDDGDMSGIESEIETFFSGGWDNESSEDIKDPKADSIDNNLGSVNDVIWEELLSDDLIAGNEEEVPPLRLGDHHEPETDVEVEDLVATPSDWGEDFQDLVDQMAFLRSKS

SEQ ID NO: 4820 - DNA, 1197 bp, Vitis vinifera
  CDS (1)..(1197)
atggagtcagtggaagttaaagaagagagcatgtgggtggaggttgaggatagtggggagttgtgggggagttcagtggcggccaaagaggagaagatgctggaggctgatggtggtggtgagagtggatggtgttgttcgtctttggcggcggcggcggaggttgcgaagccgatggagggactacatgaggcaggtccgccgccgtttctgaagaagacgttcgaaatggtggaggacccagaaaccgattcggtagtgtcgtggagcgtggctcgtaacagcttcattgtttgggactcccacaacttttcccagagtcttcttcccaagtacttcaagcacagtaacttctccagcttcattcgccagctcaacacttatggcttcagaaagattgattcagatcgatgggagtttgcaaatgaagcgtttcaaggagggaagagacatctgctgaagaacatcaagaggagaagacatggttgcttgcagcaacaaggatccagatctggtgctgaatcggtgaaactccaattggaagctgaagttgagagtctgagaaaagatcagaacatcttaaatgtcgaaatcttgagaatgagacaacggcaggagacatcacagaatcatctgactgcggtcgaagagcgcatccgaggtgcagagtgtaagcaaaaacagatgttcattttcatggccaaggccgtgaagaaccctagcttcgttcagcagctaatccagaagaggcagaaaagagaactgggtgatggtgaaattgggaagaaacgaaggctggcttcaatgctcagcgttgggagcttgctggaggcaatatttagtaaccaaactgttcactaccgaaaccaaaacctagttcaagaagaaccctcactccaatcagagatccaatcgttgttctgttcaggcatagatgatgaatcaggaggcagtcctcctgaggatcaggaggccaatgtgatatctggaacaggtaatccagatttattatcttttaataatggaatgctggagaaactgatggaggaagatcccatttgccaaaatgaagcagaggagttgctatccgggaaaccttcaattcttgattttgaattggaggagtggattgaaaagcctgttgattggtctgtgtatgtaaaagagctgatggagccgcaatttggttgtgtttga

SEQ ID NO: 4821 - protein, 398 aa, Vitis vinifera
MESVEVKEESMWVEVEDSGELWGSSVAAKEEKMLEADGGGESGWCCSSLAAAAEVAKPMEGLHEAGPPPFLKKTFEMVEDPETDSVVSWSVARNSFIVWDSHNFSQSLLPKYFKHSNFSSFIRQLNTYGFRKIDSDRWEFANEAFQGGKRHLLKNIKRRRHGCLQQQGSRSGAESVKLQLEAEVESLRKDQNILNVEILRMRQRQETSQNHLTAVEERIRGAECKQKQMFIFMAKAVKNPSFVQQLIQKRQKRELGDGEIGKKRRLASMLSVGSLLEAIFSNQTVHYRNQNLVQEEPSLQSEIQSLFCSGIDDESGGSPPEDQEANVISGTGNPDLLSFNNGMLEKLMEEDPICQNEAEELLSGKPSILDFELEEWIEKPVDWSVYVKELMEPQFGCV

SEQ ID NO: 4822 - DNA, 1437 bp, Ricinus communis
  CDS (1)..(1437)
atggttgctcctgatactagttcctgcggtggcggtggagatttttctccgacgttctctgcaactttcttgccaatacctcttcaagaatcaacagaaccaattgtagagaaggatgataaattcgtacagccaagagaatcaaatgtagagaaagatgataaatttgtagaatctgttattgctattaaaaaagaggtaatgccgcttgtgcccgatgattcgtcttcaagagtagtcgcaatcaaagaagaagaagaagaggaggaggaggatgaggtggggaaagaagaaaaagatactggtgattttcgtgacagtgttactaataataacaatgggtcatcttcttcttcttcttcagtcgatttgcctaaacctatggagggtttacatgagaatggcccaccaccgtttctaaagaagacttttgagatggtggaggatcctgatactgattgcactgtttcttggagtgaaaatcgtggaagttttattgtctgggatgctcatgaattttctaaacatcttcttcctaaatatttcaagcactgtaatttctctagcttcattcgccagctcaacacctatggatttagaaagattgatcctgatagatgggaattcgcaaatgaaggatttcaaggagggaagaagcatttgctcaaaaatatcaagagaagaagtaggcacagcaggccacaacaaggagcagcaagtattgatgctgattctgcaaaacctggtttggaagctgaacttgaaaatttgaagaatgatcacgatttactgagggttgaaattctcaaactcaaacagcaacgagaagattccgataatcaacttagcattgttgaacaacgcattcgatatgcagagaccaaacaattgcagatgttcattttctttgccaaagcaactaaaaaccgcagctttattcaaaatttaatccacaagaaaaagcaacaaagagaactagatgggagtgagtttgtaaagaaaagaagactggttccagatcaaacccaaacccaagtcccagaaagccccaatgcagtagatgcaagccaaagtgtcatctgcagaaatcaagctcagaaacacttggcaacaatgcaaacggaacttactgagatgctaaaagagaacacagagaccaacccaatgtcaaaactattggaggctcctttgactgatggtttctgcgttgaagatcataaggccaatgttatgtgttcaaatggacaggattctgtttatcatctaatgtcagagacattacttgatgacaatgtaatttccgaggattcagttgatgaagattcagttgtgaatgactcaacgttctaccttgaattggaggatttgattggaaagccacgaacttggggtggatatgtaactcatgagctggtagagcatgcaggctgtatgtga

SEQ ID NO: 4823 - protein, 478 aa, Ricinus communis
MVAPDTSSCGGGGDFSPTFSATFLPIPLQESTEPIVEKDDKFVQPRESNVEKDDKFVESVIAIKKEVMPLVPDDSSSRVVAIKEEEEEEEEDEVGKEEKDTGDFRDSVTNNNNGSSSSSSSVDLPKPMEGLHENGPPPFLKKTFEMVEDPDTDCTVSWSENRGSFIVWDAHEFSKHLLPKYFKHCNFSSFIRQLNTYGFRKIDPDRWEFANEGFQGGKKHLLKNIKRRSRHSRPQQGAASIDADSAKPGLEAELENLKNDHDLLRVEILKLKQQREDSDNQLSIVEQRIRYAETKQLQMFIFFAKATKNRSFIQNLIHKKKQQRELDGSEFVKKRRLVPDQTQTQVPESPNAVDASQSVICRNQAQKHLATMQTELTEMLKENTETNPMSKLLEAPLTDGFCVEDHKANVMCSNGQDSVYHLMSETLLDDNVISEDSVDEDSVVNDSTFYLELEDLIGKPRTWGGYVTHELVEHAGCM

SEQ ID NO: 4824 - DNA, 1014 bp, Beta vulgaris
  CDS (1)..(1014)
atggaacccaaaactgagttatcactcggtggtggaatcaggagttctgggtttgttacaactaaaatggaggatacagaagaaaaagaagtgatagagttgccaaaaccattagaaaatttacatgaaattggaccacccccatttttaagtaagacatttgagatagtagaagacccagaaactgacacaattgtttcatggggtgtaacttttgatagtttcattgtttgggatatctctaagttctctgatttgctttctaagtattttaagcatcgtaatttcaacagctttgtccgtcaacttaatacttatggattcagaaaagtccatcttgatcggttggagtatgcaaattcagggtttcaaaagggtaaaaagcatttgttgaagactataaaaaggagaaaccatggtgcaaacaacaatactgcactattgctccaaagagagactgcaatagaaaatattaagaaagaacaggaggcgctaaagctcgagatccttgatcttaagaaagaacaacagaactcgaacacgtgtttggctgcattgggagagcgtgtgaagttcgttgaatggaagcaacgtgagttcattatgctcattgccaaggcaatgaaaagaacttcctcatttcagcaggttctccaaaactataggcacaacaaagttctgagtagtggagaattttacaagaaacgtagattggcctcaactagcgacagtctggcactggcagaccagtttctggcaaacagtccgaccacgacccaaaataaggaagatgtgtctacttttcagtatgaagcaaactcgtttgttgggtctgcgggccaaaagtcgaacttggcatccgagactagtagtccagatttgtcttctggaagctacataatgtgggaaaagctaatggcagatgatgtgatctgtaaagatgatagggaggagaagtatgtccatgaattagagaatttgattactaaaccatccagcttgatttgcaaataa

SEQ ID NO: 4825 - protein, 337 aa, Beta vulgaris
MEPKTELSLGGGIRSSGFVTTKMEDTEEKEVIELPKPLENLHEIGPPPFLSKTFEIVEDPETDTIVSWGVTFDSFIVWDISKFSDLLSKYFKHRNFNSFVRQLNTYGFRKVHLDRLEYANSGFQKGKKHLLKTIKRRNHGANNNTALLLQRETAIENIKKEQEALKLEILDLKKEQQNSNTCLAALGERVKFVEWKQREFIMLIAKAMKRTSSFQQVLQNYRHNKVLSSGEFYKKRRLASTSDSLALADQFLANSPTTTQNKEDVSTFQYEANSFVGSAGQKSNLASETSSPDLSSGSYIMWEKLMADDVICKDDREEKYVHELENLITKPSSLICK

SEQ ID NO: 4826 - DNA, 1116 bp, Helianthus annuus
  CDS (1)..(1116)
atggcaggagtagtaaaagagtttgactctagtcatgatatgttcaaagtcagagaagaacccaaggtcgtttttaataataaagatttgtctgaagagatgatgaagattaaagaggaacccatgttagtgtttgatgagcatgaagattttgttggtggtgaggaggcaccgaagccgattgaagggctgagagacggcggacctccgccgtttctcaagaaaacatttgaaatggtggatgacccaacaacagattcgattatttcatggagtagttctaaaaatagttttattctttgggatcctcataagttttctactgatcttttgccgcaaagattcaagcacaataatttctctagctttgttcgtcaactaaacacttataggttcaagaaaatcgatcctgaccgatgggaattcgcaaacgagtttttccaaaagggtaagaagcatttgttaagagacataaagaggagaacaaaccagccacaaaacacacaaaaacaagaggaaatcaggaaacaagaacaacaacaatgttgtggtcatcaaacaaactctacaatggagaccgagctaaagaatctaagaaaagaaagaatcacacttaaacaagagatcttgaagatgaaacagcaacaagagaacaccgaaaagcatttggaaatggttgaagaacgtatgctaagaatggagttcaagcaacagcagctgttagttttcatgtctaaagcgtttagaaatccgattttcgttaagcttttgcaacatctggtgcaaaaacaaaaaacgggaagtgtcgaaatgtgcaaaaagcgaaaacttgagcaaatgctaaacactgatgatctcgatcgttttcaagaaatgtggaatatgattgaacctgatgcgtatactgtgttgtcatcagatggatcagtaagcccgcctgaagatcaaaacacgagtgacaaatctggatccaacggttcagattacaattcggaaagctttatattgtgggagaaactaatggaggacgaactgatattcggcggtgaacaatcgggtaaagatcaaacagaaacttatctccaagaatgggaagagttgatcccaaaagcttaa

SEQ ID NO: 4827 - protein, 371 aa, Helianthus annuus
MAGVVKEFDSSHDMFKVREEPKVVFNNKDLSEEMMKIKEEPMLVFDEHEDFVGGEEAPKPIEGLRDGGPPPFLKKTFEMVDDPTTDSIISWSSSKNSFILWDPHKFSTDLLPQRFKHNNFSSFVRQLNTYRFKKIDPDRWEFANEFFQKGKKHLLRDIKRRTNQPQNTQKQEEIRKQEQQQCCGHQTNSTMETELKNLRKERITLKQEILKMKQQQENTEKHLEMVEERMLRMEFKQQQLLVFMSKAFRNPIFVKLLQHLVQKQKTGSVEMCKKRKLEQMLNTDDLDRFQEMWNMIEPDAYTVLSSDGSVSPPEDQNTSDKSGSNGSDYNSESFILWEKLMEDELIFGGEQSGKDQTETYLQEWEELIPKA

SEQ ID NO: 4828 - DNA, 1056 bp, Solanum peruvianum
  CDS (1)..(1056)
atggaggatgtaatgaaagtgaaggtcgaagaagatggcattccgacggctgtgctgcctatggaagggctgcacgacgttggtccgccgccatttctgagcaaaacttatgaaatggtggaagattcctcaactgatcaagtcatatcatggagcacaacaaggaatagctttattgtttgggattctcataagttttccaccacattgttgcctaggtttttcaagcacagcaatttttccagtttcattcggcagcttaacacatatggatttagaaaggtggatcctgacagatgggaatttgcgaatgaaggttttctgggagggcaaaagcatcttttgaagacgataaagaggaggaggaatgttggtcagagtatgaatcaacaaggatctggtgcttgcattgaaattggttattatgggatggaggaggagctagaaagattaaagcgggataaaaacgtgttgatgactgaaatagttaaacttaggcagcaacagcagagtacgaggaatcagatcattgccatgggagaaaaaatcgaaacacaggagaggaaacaagtgcagatgatgagtttcttagcaaagattttcagcaatccaacttttctccagcagtacttggacaaacaggtgcacagaaaagataaacaacgtatcgaagttggacaaaagaggagactaacgatgacccccagtgttacaggaagtgatcaacctatgaattactcctcatcactccaagagagtgaagctgagcttgcaagtattgaaatgttattctctgctgcaatggacaatgaatcaagcagcaatgtcaggccggattctgttgtgacagcaaatggaactgatatggaaccagtggctgatgatatttgggaagagttgctcagtgaagatcttatatctggggatcgagcagcagaggaagtagtggttgttgaacaacctgaattcgacgtggaagttgaagatcttgttgtgaaaacacctgaatggggtgaggaattacaagaccttgtagatcaacttggtttcctttag

SEQ ID NO: 4829 - protein, 351 aa, Solanum peruvianum
MEDVMKVKVEEDGIPTAVLPMEGLHDVGPPPFLSKTYEMVEDSSTDQVISWSTTRNSFIVWDSHKFSTTLLPRFFKHSNFSSFIRQLNTYGFRKVDPDRWEFANEGFLGGQKHLLKTIKRRRNVGQSMNQQGSGACIEIGYYGMEEELERLKRDKNVLMTEIVKLRQQQQSTRNQIIAMGEKIETQERKQVQMMSFLAKIFSNPTFLQQYLDKQVHRKDKQRIEVGQKRRLTMTPSVTGSDQPMNYSSSLQESEAELASIEMLFSAAMDNESSSNVRPDSVVTANGTDMEPVADDIWEELLSEDLISGDRAAEEVVVVEQPEFDVEVEDLVVKTPEWGEELQDLVDQLGFL

SEQ ID NO: 4830 - DNA, 1128 bp, Helianthus annuus
  CDS (1)..(1128)
atgatggatgggtcacaagggggttcaagttcatcaccgccatttctgaataaaacatatgaaatggtcgatgaccctttgacagatcatattgtttcttggagtcatactgggagtagttttgttgtttggaatccacccgagtttgctagcgaattgcttccgaaatatttcaagcacaacaatttttctagcttcgttcgacagcttaatacatatggttttaaaaagatagatcctgaccaatgggaattcgcaaacgaagaattcataaaaggtcaacgacaccttttgaaaaatattcacagacggaaaccggtccatagccactcaacagtaccgacacaaggggctaatataaaccaattatctccttcagaaaaaaaggaatacgaagacgaaatcaagaaactaaaacacgaaacaagttctcttcgattccagttacaaacccacaagcaagaaaatcaagaaaacgaacacaagttaacctttttactcggacgattaaagaccatacaatcaaagcagaagaacatgatgtcgtttcttgctcaattactcgaaaatacaagaacgtcttcctcgcgacatttggaaacaaacagcaaaaagagaagattactaatatcgacatatttacatgacgaagccaatgcagaagaaaacgaaaatttggagattcacgtgctaataaaaaaactcgattcatcgttgaatttttgggtggattttgtgaacgaaagcgtaaaaccttcgggtcaagaaaaacatgattcaaaagtggatcatgctgacagccctattgatgtttcgttggtctacgttaatcaagattctcgggtgaaatctaaatcttcagggatcgacgtgaatgtagagccagctggcggtggcggtggtggtgatgctggtggtagagtggtggtaccgccagtgcaaacgggagcgaacgatgtattctgggaacagtttttgactgagacacctggcggtggtgacacgcaggaagttcagtctgagagacgagatgtaatcaagtctttgtggagtgcaaataatgtagataaaattacagaaaaaatggggaatcttagtagtccttctggtaagcttgatgttcgatga

SEQ ID NO: 4831 - protein, 375 aa, Helianthus annuus
MMDGSQGGSSSSPPFLNKTYEMVDDPLTDHIVSWSHTGSSFVVWNPPEFASELLPKYFKHNNFSSFVRQLNTYGFKKIDPDQWEFANEEFIKGQRHLLKNIHRRKPVHSHSTVPTQGANINQLSPSEKKEYEDEIKKLKHETSSLRFQLQTHKQENQENEHKLTFLLGRLKTIQSKQKNMMSFLAQLLENTRTSSSRHLETNSKKRRLLISTYLHDEANAEENENLEIHVLIKKLDSSLNFWVDFVNESVKPSGQEKHDSKVDHADSPIDVSLVYVNQDSRVKSKSSGIDVNVEPAGGGGGGDAGGRVVVPPVQTGANDVFWEQFLTETPGGGDTQEVQSERRDVIKSLWSANNVDKITEKMGNLSSPSGKLDVR

SEQ ID NO: 4832 - DNA, 1065 bp, Brassica napus
  CDS (1)..(1065)
atggaacaactgaaagtggaattggaggaagagacggtgacctacggtggctcagcggcagcttcttcgtctgttggttcgtcatcgtcaccgagaccaatggaagggcttaacgagacagggccaccgccgtttctgacaaagacttacgacatggtggaggatccggcaacggacacggtggtgtcttggagcagtggtcgtaacagtttcatcgtttgggattctcacaaattctccaccactctccttcctcgctacttcaagcatagcaatttctccagcttcattcgtcagctcaacacttatggattcagaaagatcgatccggacagatgggagttcgcgaacgaagggtttttggcggggcagaagcatctcctgaagagcataaaacgaaggagaaacatgggtttgcagactgtgaatcagcaaggatcaggatcaggatcaggatcaggatcaggtatgtcttgtgtggaagtcgggcaatacggcttcgaaggggaggtagagagactgaaaagggaccatagcgtgctcgtagctgaggtagttaggctgagacagcagcaacataaatccaagagccaagccgcagaaatggagcaacgtttgctagttacagagaaaagacagcagcaaatgatgacgttcctcgccaaggccttgaacaatccaaactttgttcaacagttcgcgctaatgagcaaagagaagaagggtttgttcggctccgatgttggtaggaagcggaggcttacttctagtccaagcttggggactatcgaggagagagtgttgcatgatcaggagttcgatagaatgaaggatgatatggagacgttacttgctgcagccatagatgatgaggcgagtaatttggtggccgctagtaaggatgaacaatgtttggaagctatgaatgtgatgatggaagatggttctttagagccagagatagatgtcaaagtggaagattttgtagcttcaccgttggattggggcagtgaggacctacacgacattgtcgatcaaatgggttttcttggatcagaaccttga

SEQ ID NO: 4833 - protein, 354 aa, Brassica napus
MEQLKVELEEETVTYGGSAAASSSVGSSSSPRPMEGLNETGPPPFLTKTYDMVEDPATDTVVSWSSGRNSFIVWDSHKFSTTLLPRYFKHSNFSSFIRQLNTYGFRKIDPDRWEFANEGFLAGQKHLLKSIKRRRNMGLQTVNQQGSGSGSGSGSGMSCVEVGQYGFEGEVERLKRDHSVLVAEVVRLRQQQHKSKSQAAEMEQRLLVTEKRQQQMMTFLAKALNNPNFVQQFALMSKEKKGLFGSDVGRKRRLTSSPSLGTIEERVLHDQEFDRMKDDMETLLAAAIDDEASNLVAASKDEQCLEAMNVMMEDGSLEPEIDVKVEDFVASPLDWGSEDLHDIVDQMGFLGSEP

SEQ ID NO: 4834 - DNA, 1065 bp, Brassica napus
  CDS (1)..(1065)
atggaacaactgaaagtggaattggaggaagagacggtgacctacggtggctcagcggcagcttcttcgtctgttggttcgtcatcgtcaccgagaccaatggaagggcttaacgagacagggccaccgccgtttctgacaaagacttacgacatggtggaggatccggcaacggacacggtggtgtcttggagcagtggtcgtaacagtttcatcgtttgggattctcacaaattctccaccactctccttcctcgctacttcaagcatagcaatttctccagcttcattcgtcagctcaacacttatggattcagaaagatcgatccggacagatgggagttcgcgaacgaagggtttttggcggggcagaagcatctcctgaagagcataaaacgaaggagaaacatgggtttgcagactgtgaatcagcaaggatcaggatcaggatcaggatcaggatcaggtatgtcttgtgtggaagtcgggcaatacggcttcgaaggggaggtagagagactgaaaagggaccatagcgtgctcgtagctgaggtagttaggctgagacagcagcaacataactccaagagccaagtcgcagaaatggagcaacgtttgctagttactgagaaaagacagcagcaaatgatggcgttcctcgccaaggccttgaacaatccaaactttgttcaacagttcgcgctaatgagcaaagagaagaagggtttgttcggttccgatgttggtaggaagcggaggcttacttctagtccaagcttggggactatcgaggagagagtgttgcatgatcaggagttcgatagaatgaaggatgatatggagacgttacttgctgcagccatagatgatgaggcgagtaatttggtggccgctagtaaggatgaacaatgtttggaagctatgaatgtgatgatggaagatggttctttagagccagagatagatgtcaaagtggaagattttgtagcttcaccgttggattggggcagtgaggacctacacgacattgtcgatcaaatgggttttcttggatcagaaccttga

SEQ ID NO: 4835 - protein, 354 aa, Brassica napus
MEQLKVELEEETVTYGGSAAASSSVGSSSSPRPMEGLNETGPPPFLTKTYDMVEDPATDTVVSWSSGRNSFIVWDSHKFSTTLLPRYFKHSNFSSFIRQLNTYGFRKIDPDRWEFANEGFLAGQKHLLKSIKRRRNMGLQTVNQQGSGSGSGSGSGMSCVEVGQYGFEGEVERLKRDHSVLVAEVVRLRQQQHNSKSQVAEMEQRLLVTEKRQQQMMAFLAKALNNPNFVQQFALMSKEKKGLFGSDVGRKRRLTSSPSLGTIEERVLHDQEFDRMKDDMETLLAAAIDDEASNLVAASKDEQCLEAMNVMMEDGSLEPEIDVKVEDFVASPLDWGSEDLHDIVDQMGFLGSEP

SEQ ID NO: 4836 - DNA, 996 bp, artificial sequence
  Synthetic Construct
  CDS (1)..(996): transl_table=11
atgacggcaattccaaacgtcgtcgatattgaatcttcttcctcttcgctttgtcaagagacggcaacggagaccgtcaccgttgaaagaggctcgtctgattcatcttcaaagccagacgacgtcgttttactaatcaaggaagaggaggatgacgccgttaacttgtcacttggtttttggaaattgcacgagataggtttaataacaccgttcttgagaaagacgtttgagatcgtcgatgacaaagtaacagacccggttgtatcatggagcccgacccgtaaaagctttatcatttgggattcttacgagttctcagagaatctacttcccaaatacttcaagcacaagaacttctccagttttattcgtcagcttaactcttacggttttaaaaaggtcgattcagataggtgggaatttgctaacgaagggtttcaaggagggaagaaacatttgcttaagaacatcaagaggagaagcaaaaacactaaatgttgtaacaaggaagcgagtaccaccacgacagagactgaggttgagtcattgaaggaggaacagagtccaatgagattggagatgttgaagctgaaacaacaacaagaagaatctcaacatcagatggtcactgtgcaggagaagatccacggagttgataccgaacaacagcatatgcttagtttctttgcaaagttggctaaagatcaaagatttgtagagagactggtgaagaagagaaagatgaaaatacagagagagctagaagcatctgaattcgtgaagaagctcaagttgcttcaggatcaagaaactcaaaagaacttgttagatgtagaaagagaatttatggccatggctgcaacagaacacaatcccgagcctgacattttggtgaacaatcaaagcgggaatacgagatgtcagcttaactcagaggacctacttgttgacggtggctcaatggatgtaaatgggaggatagagatagagtag

SEQ ID NO: 4837 - protein, 331 aa, artificial sequence
  Synthetic Construct
MTAIPNVVDIESSSSSLCQETATETVTVERGSSDSSSKPDDVVLLIKEEEDDAVNLSLGFWKLHEIGLITPFLRKTFEIVDDKVTDPVVSWSPTRKSFIIWDSYEFSENLLPKYFKHKNFSSFIRQLNSYGFKKVDSDRWEFANEGFQGGKKHLLKNIKRRSKNTKCCNKEASTTTTETEVESLKEEQSPMRLEMLKLKQQQEESQHQMVTVQEKIHGVDTEQQHMLSFFAKLAKDQRFVERLVKKRKMKIQRELEASEFVKKLKLLQDQETQKNLLDVEREFMAMAATEHNPEPDILVNNQSGNTRCQLNSEDLLVDGGSMDVNGRIEIE

SEQ ID NO: 4838 - DNA, 21 bp, Artificial sequence
  primer
atgacggcaattccaaacgtc

SEQ ID NO: 4839 - DNA, 27 bp, Artificial sequence
  primer
ctactctatctctatcctcccatttac

SEQ ID NO: 4840 - protein, 348 aa, Artificial sequence
  consensus sequence
  Variant (2)..(2): Xaa in position 2 is any amino acid
  Variant (6)..(6): Xaa in position 6 is any amino acid
  Variant (8)..(8): Xaa in position 8 is any amino acid
  Variant (12)..(12): Xaa in position 12 is any amino acid
  Variant (16)..(16): Xaa in position 16 is any amino acid
  Variant (19)..(20): Xaa in position 19 to 20 is any amino acid
  Variant (23)..(23): Xaa in position 23 is any amino acid
  Variant (26)..(26): Xaa in position 26 is any amino acid
  Variant (29)..(30): Xaa in position 29 to 30 is any amino acid
  Variant (35)..(38): Xaa in position 35 to 38 is any amino acid
  Variant (41)..(41): Xaa in position 41 is any amino acid
  Variant (45)..(47): Xaa in position 45 to 47 is any amino acid
  Variant (50)..(50): Xaa in position 50 is any amino acid
  Variant (51)..(51): Xaa in position 51 is any or no amino acid
  Variant (55)..(55): Xaa in position 55 is any amino acid
  Variant (60)..(60): Xaa in position 60 is any amino acid
  Variant (66)..(66): Xaa in position 66 is any amino acid
  Variant (77)..(77): Xaa in position 77 is any amino acid
  Variant (79)..(79): Xaa in position 79 is any amino acid
  Variant (88)..(88): Xaa in position 88 is any amino acid
  Variant (90)..(91): Xaa in position 90 to 91 is any amino acid
  Variant (93)..(94): Xaa in position 93 to 94 is any amino acid
  Variant (99)..(99): Xaa in position 99 is any amino acid
  Variant (104)..(117): Xaa in position 104 to 117 is any amino acid
  Variant (118)..(138): Xaa in position 118 to 138 is any or no amino acid
  Variant (140)..(140): Xaa in position 140 is any amino acid
  Variant (142)..(142): Xaa in position 142 is any amino acid
  Variant (144)..(144): Xaa in position 144 is any amino acid
  Variant (146)..(151): Xaa in position 146 to 151 is any amino acid
  Variant (153)..(154): Xaa in position 153 to 154 is any amino acid
  Variant (156)..(160): Xaa in position 156 to 160 is any amino acid
  Variant (162)..(162): Xaa in position 162 is any amino acid
  Variant (164)..(175): Xaa in position 164 to 175 is any amino acid
  Variant (177)..(180): Xaa in position 177 to 180 is any amino acid
  Variant (182)..(183): Xaa in position 182 to 183 is any amino acid
  Variant (185)..(185): Xaa in position 185 is any amino acid
  Variant (188)..(189): Xaa in position 188 to 189 is any amino acid
  Variant (191)..(191): Xaa in position 191 is any amino acid
  Variant (194)..(198): Xaa in position 194 to 198 is any amino acid
  Variant (199)..(199): Xaa in position 199 is any or no amino acid
  Variant (201)..(273): Xaa in position 201 to 273 is any amino acid
  Variant (274)..(347): Xaa in position 274 to 347 is any or no amino acid
PXEGLXEXGPPXPFLXKTXXMVXDPXTDXXVSWSXXXXSFXVWDXXXFSXXLLPXYFKHXNFSSFXRQLNTYGFRKXDXDRWEFANEXFXXGXXHLLKXIKRRXXXXXXXXXXXXXXXXXXXXXXXXXXXXXXXXXXXEXEXEXLXXXXXXLXXEXXXXXQXQXXXXXXXXXXXXRXXXXEXXQXQMXXFXAKXXXXXXFXXXXXXXXXXXXXXXXXXXXXXXXXXXXXXXXXXXXXXXXXXXXXXXXXXXXXXXXXXXXXXXXXXXXXXXXXXXXXXXXXXXXXXXXXXXXXXXXXXXXXXXXXXXXXXXXXXXXXXXXXXXXXXXXXXXXXXXXXXXXXXXXXXXE

SEQ ID NO: 4841 - protein, 56 aa, Artificial sequence
  protein pattern
  Variant (2)..(5): Xaa in position 2 to 5 is any amino acid
  Variant (8)..(8): Xaa in position 8 is Lys or Arg
  Variant (13)..(13): Xaa in position 13 is any amino acid
  Variant (19)..(19): Xaa in position 19 is Ile or Val
  Variant (24)..(24): Xaa in position 24 is Ala, Ser or Thr
  Variant (28)..(28): Xaa in position 28 is Lys or Arg
  Variant (30)..(30): Xaa in position 30 is Ile or Val
  Variant (32)..(32): Xaa in position 32 is Pro or Ser
  Variant (34)..(34): Xaa in position 34 is Gln or Arg
  Variant (41)..(41): Xaa in position 41 is Ala, Glu or Gly
  Variant (43)..(44): Xaa in position 43 to 44 is any amino acid
  Variant (46)..(46): Xaa in position 46 is any amino acid
  Variant (47)..(47): Xaa in position 47 is Lys or Arg
  Variant (48)..(48): Xaa in position 48 is Glu or His
  Variant (52)..(52): Xaa in position 52 is Asn, Ser or Thr
  Variant (54)..(54): Xaa in position 54 is His, Lys or Arg
FXXXXLPXYFKHXNFSSFXRQLNXYGFXKXDXDXWEFANEXFXXGXXXLLKXIXRR

SEQ ID NO: 4842 - DNA, 378 bp, Escherichia coli
  CDS (1)..(378): transl_table=11
atgatcaattcgccccgagtgtgtattcaggttcaaagcgtctacattgaggctcaatcttcacctgataatgaacgttacgtttttgcttataccgtaaccatacgcaatctggggcgagcgccagtgcagttgttggggcgttactggctgatcaccaatggcaatggccgtgaaaccgaagtccagggcgaaggagtggttggcgtccagccacttatcgcgcctggcgaagagtaccagtacaccagcggtgcaatcattgaaaccccgctgggcaccatgcagggtcactacgaaatgatcgatgaaaatggcgtccctttcagcatcgacattcccgtattccgactcgccgttcccacactcattcattaa

SEQ ID NO: 4843 - protein, 125 aa, Escherichia coli
MINSPRVCIQVQSVYIEAQSSPDNERYVFAYTVTIRNLGRAPVQLLGRYWLITNGNGRETEVQGEGVVGVQPLIAPGEEYQYTSGAIIETPLGTMQGHYEMIDENGVPFSIDIPVFRLAVPTLIH

SEQ ID NO: 4844 - DNA, 903 bp, Oryza sativa
  CDS (1)..(903)
atgcagtgggcggcgctgagctcgccgccggcaccggcggcgccggcggcggtgtggatggggcggagggcaagaaccgcgaggttgccgtcgccggggccgcgccgggtggtgctggccgccgcggcgtcgtcgtcgtcgccgtcgccggatgcgaactcgagctcgaactcgaactcgccggggagtggtggcggcggcgaggaggtggaggaggagagggaggacgcggcgcggatggagaaggcggcggccttcctgatgcggagccagaagtacgccatgctcaagcagcagctcgccgtggccgcccagttcgaggattacaaggaggcggcgaggctgagggattcgctcaagtcattcgaggaggaggagccagttcttcgtctccgccgatcgctcaagaaggcggttgaggaggagaggttcgaggatgctgctaagtacagagatgaactgaagattttggctccacacgccctcctaaaatgttctagtgatgctactaccctggggattagagttcaagtcaggagtgtttatattgaaagccggagccagcctttgaagggccagttcttctttgcctacagaatcagaatcacaaataattctcagcgccctgttcagcttctcagaagacattggattgtcactgatgcaaatggaaggacggagaacatttggggtgtaggtgttgtgggagagcaacctgtcatatttccaaggactggttttgagtactcatctgcatgcccattaaacacaccaaatgggagaatggaaggtgattttgagatgaagcacatcgacaaagctgggtcgtctacattcaatgtcgcaattgcaccattctctctgtcaatccttggagatgacaacgatgatgttctcctctaa

SEQ ID NO: 4845 - protein, 300 aa, Oryza sativa
MQWAALSSPPAPAAPAAVWMGRRARTARLPSPGPRRVVLAAAASSSSPSPDANSSSNSNSPGSGGGGEEVEEEREDAARMEKAAAFLMRSQKYAMLKQQLAVAAQFEDYKEAARLRDSLKSFEEEEPVLRLRRSLKKAVEEERFEDAAKYRDELKILAPHALLKCSSDATTLGIRVQVRSVYIESRSQPLKGQFFFAYRIRITNNSQRPVQLLRRHWIVTDANGRTENIWGVGVVGEQPVIFPRTGFEYSSACPLNTPNGRMEGDFEMKHIDKAGSSTFNVAIAPFSLSILGDDNDDVLL

SEQ ID NO: 4846 - DNA, 795 bp, Glycine max
  CDS (1)..(795)
atgcaatcgttatcgttgagtatgagtctgaggagtagtagcttagtgaattttcttttgctgggttcagagacgagagtgagaagcagaaggagtgtcatcgtagcgtgtgcttcagagggagacagtggcagcagtagcacaagctcgtttctctctcggacccaaacctacgctcttcttaagcaacaattgcaagtagctgctaaatccgaggattacaaggaagccgctagaattcgagactcgttgaagctatttgaggacgaggaacctgttttgcgtctgaggagactattgaaggaagcagttgctgaagagagatttcaggatgctgctagttatcgtgatgagctaaacaaaattgctccacactctcttttaaaatgttgcagtgatgctacaacattgggaatcagggttcaagttaggagtgtatatatagagggcagaagtcagccttcaaaggggctatatttctttgcatatagaataagaattactaataactcagaacaccctgttcaacttcttagaaggcattggattataactgatgctaatgggagaacggaaaatgtctggggaattggagttgttggtgaacagccattaatacttcctgggaatagttttgaatactcttcagcatgcccactgaacacaccaaatggtagaatggaaggtgattatgagatgatccatgtagaaagagtaggctcacaatcattcaatgtggccattgccccgttttctctctgtctgcttggagatgatgaaggttgtattatttaa

SEQ ID NO: 4847 - protein, 264 aa, Glycine max
MQSLSLSMSLRSSSLVNFLLLGSETRVRSRRSVIVACASEGDSGSSSTSSFLSRTQTYALLKQQLQVAAKSEDYKEAARIRDSLKLFEDEEPVLRLRRLLKEAVAEERFQDAASYRDELNKIAPHSLLKCCSDATTLGIRVQVRSVYIEGRSQPSKGLYFFAYRIRITNNSEHPVQLLRRHWIITDANGRTENVWGIGVVGEQPLILPGNSFEYSSACPLNTPNGRMEGDYEMIHVERVGSQSFNVAIAPFSLCLLGDDEGCII

SEQ ID NO: 4848 - DNA, 798 bp, Glycine max
  CDS (1)..(798)
atgcaatccttatcgttaagtatgagtctgaggagtagtagtttagcgaattttctgttgctgagttcagagacgagagtgagaagaagaagaaggagtgtcatcgtagcgtgtgctttggagggagacagtggtagcagtagcacaagctcctttctctctcggacccaaacctacgcccttcttaagcaacaattgcaagtggctgctaaatctgaggattacaaggaagcagctagaattcgagactcgttgaagcaatttgaggacgaggagcctgttttgcgtctgaggagactattgaaggaagcaattgctgaagagagattccaggatgctgctagttaccgtgatgagctaaacaatattgccccacactctcttttaaaatgttgcagcgatgctacaacattgggaatcagggttcaagttaggagtgtatatatagagggcagaagtcagccttcaaaggggctatacttctttgcatatagaataagaattaccaataactcagaccaccctgttcaacttcttagaaggcattggattataactgatgctaatgggagaacggaaaatgtctggggaattggagttgttggtgaacagccattaatacttcctggaaatagttttgaatactcttcagcatgcccactgaacacaccaaatggtagaatggaaggtgattatgagatgatccattttgaaagagtaggctcacgatcattcaatgtggccattgccccgttttctctctctctgcttggagatgatgaaggttgtgttatttga

SEQ ID NO: 4849 - protein, 265 aa, Glycine max
MQSLSLSMSLRSSSLANFLLLSSETRVRRRRRSVIVACALEGDSGSSSTSSFLSRTQTYALLKQQLQVAAKSEDYKEAARIRDSLKQFEDEEPVLRLRRLLKEAIAEERFQDAASYRDELNNIAPHSLLKCCSDATTLGIRVQVRSVYIEGRSQPSKGLYFFAYRIRITNNSDHPVQLLRRHWIITDANGRTENVWGIGVVGEQPLILPGNSFEYSSACPLNTPNGRMEGDYEMIHFERVGSRSFNVAIAPFSLSLLGDDEGCVI

SEQ ID NO: 4850 - DNA, 873 bp, Zea mays
  CDS (1)..(873)
atgcagtgggcgggtctgagatcgcaggcgccggttcccacggcggcgtggacggggccgaggccaagaaccgcgaggtgcccgcagggtagattccccacagcgcgccgggcgctggtggcgtcggcagcggcctcggacgctaattcgagctcgaattcgccggggaaggacgaggagggggaggaggtggtgcgaagggagaaggaggagaaggcggtcgcgtcgcttctgatgagaagccagaagtacgccatgctaaagcagcagctcgccgtggccgcccaatttgaggattacaaggaagcagcgaggttgagggactcgctgaggtccttcgaggagaaggagcctgtgttgtgcctccgccggttgatgaagaaggccattgaggaggagaggtttgaggatgctgctaaatacagagatgaattaaagattttggctccacactccctcctcaaatgttctagtgatgcaactactttggggataagagttcaagtcaggagcgtctatattgaaagccggagccagccattgaaagggcaattcttttttgcttatagaattagaattacgaatagttctcagcgccctgttcagcttctcaaaaggcactggattgttacagatggaaatggaaggacagaaaacatttggggagttggagtagtgggagaacaacctgtcatattcccgaagactggttttgagtactcttctgcatgcccattgagcactccaaatgggagaatggaaggtgactttgagatgaagcacatcgacaaggctggatcatcaacattcaatgttgcaattgcgccattctctctgtcaattcttggtgacgataatgatgttctgctatga

SEQ ID NO: 4851 - protein, 290 aa, Zea mays
MQWAGLRSQAPVPTAAWTGPRPRTARCPQGRFPTARRALVASAAASDANSSSNSPGKDEEGEEVVRREKEEKAVASLLMRSQKYAMLKQQLAVAAQFEDYKEAARLRDSLRSFEEKEPVLCLRRLMKKAIEEERFEDAAKYRDELKILAPHSLLKCSSDATTLGIRVQVRSVYIESRSQPLKGQFFFAYRIRITNSSQRPVQLLKRHWIVTDGNGRTENIWGVGVVGEQPVIFPKTGFEYSSACPLSTPNGRMEGDFEMKHIDKAGSSTFNVAIAPFSLSILGDDNDVLL

SEQ ID NO: 4852 - DNA, 393 bp, Mesorhizobium loti MAFF303099
  CDS (1)..(393): transl_table=11
atgtaccgcgccgtcacgcgcaacatcgaagtgcaggtcaggccgttctacctcgaggatcgctccgatccttccgagaaccgctatgtctggggctatcagataacgatcgacaatcagtcggacgaattcgtgcagcttctgtcacgctactggcacatcaccgacggcgccggccgggtcgaggaagtgcgcggcccgggcgtcgtcggcgaccagcccgaactcaatcccggcgacagctatcaatatacgtctggctgcccgctctcgacgccatcaggcatcatggtcgggcactacacgatgcgcaacaagcgtggcgagaccttcgacatcgccatcccggcgttctcgctggacctgccggggaccagacggacggtgaattag

SEQ ID NO: 4853 - protein, 130 aa, Mesorhizobium loti MAFF303099
MYRAVTRNIEVQVRPFYLEDRSDPSENRYVWGYQITIDNQSDEFVQLLSRYWHITDGAGRVEEVRGPGVVGDQPELNPGDSYQYTSGCPLSTPSGIMVGHYTMRNKRGETFDIAIPAFSLDLPGTRRTVN

SEQ ID NO: 4854 - DNA, 381 bp, Vibrio cholerae O1 biovar El Tor str. N16961
  CDS (1)..(381): transl_table=11
atggatgtttcgctgccctgtatcaaaattcaggttcaaactcgctacattgaggaacaatcaaatcctgagtatcagcgctttgtgttcgcctatctcatcaccatcaaaaatctcagctcccagaccgtccaactgatgagtcggcgctggttgatcacggatgccgatggcaaacagaccgtggttgaaggcgatggcgttgtgggagagcaacctcgcatcaaagctaacgatgaatatacctacagcagtggcacggccttagatactcccgtcggtgtgatgcaggggcaatatttgatgatcgatgaacaaggtgagtctttcacggttgagattgaaccatttcgtttagccgttccgcatgtattgaattaa

SEQ ID NO: 4855 - protein, 126 aa, Vibrio cholerae O1 biovar El Tor str. N16961
MDVSLPCIKIQVQTRYIEEQSNPEYQRFVFAYLITIKNLSSQTVQLMSRRWLITDADGKQTVVEGDGVVGEQPRIKANDEYTYSSGTALDTPVGVMQGQYLMIDEQGESFTVEIEPFRLAVPHVLN

SEQ ID NO: 4856 - DNA, 393 bp, Agrobacterium tumefaciens str. C58
  CDS (1)..(393): transl_table=11
atgtatcgtgctctgacaagggatatcgaggtgacggtcgatccgtattatctcgaggaacaatccgacccggatgacgatcgttacgtctggggctataaagtcgtgatcgcgaacaattccgatgtccccgtaaaactcgtcaaccgttattggcatatcaccgatcagaacggacaggtggacgaggtctacgggccgggcgtcgtgggtgaacagccgcagctcaaaccaggcgacagctatgaatattcctcgggctgcccgctggatacgccttcaggcctgatgttcggccattatgagatggaaacggaaaatggcgaggtgttcaatgtcaccatacccgccttttcgctggattcacccggcctgatgcgcgtcctgaactga

SEQ ID NO: 4857 - protein, 130 aa, Agrobacterium tumefaciens str. C58
MYRALTRDIEVTVDPYYLEEQSDPDDDRYVWGYKVVIANNSDVPVKLVNRYWHITDQNGQVDEVYGPGVVGEQPQLKPGDSYEYSSGCPLDTPSGLMFGHYEMETENGEVFNVTIPAFSLDSPGLMRVLN

SEQ ID NO: 4858 - DNA, 393 bp, Sinorhizobium meliloti 1021
  CDS (1)..(393): transl_table=11
atgtaccgcgcgctgacacgcgacatcgaagtgacggtcgagccgtactacctggaagaacagtcggatcccgacgacagccgctatgtctggggctatcgcatcatcatagcgaaccattccggactcgcggtccggctgatgacccgctactggcacattaccgacgagaacggtcaggtggacgaggtgagcggccccggcgtgatcggcgagcagccgctgctcaatcccggcgatacctacgagtactcctccggctgcccgctggatacaccctccggcgtgatgttcggccattacagcatggaggcggaaggcggggagactttcgatgtcgccatccccgccttctcgctcgattcgccgggcctcgtccgcacgcttaattga

SEQ ID NO: 4859 - protein, 130 aa, Sinorhizobium meliloti 1021
MYRALTRDIEVTVEPYYLEEQSDPDDSRYVWGYRIIIANHSGLAVRLMTRYWHITDENGQVDEVSGPGVIGEQPLLNPGDTYEYSSGCPLDTPSGVMFGHYSMEAEGGETFDVAIPAFSLDSPGLVRTLN

SEQ ID NO: 4860 - DNA, 378 bp, Salmonella enterica subsp. enterica serovar Typhi str. CT18
  CDS (1)..(378): transl_table=11
atgatcaattcgcccagagtgtgtattcaggtgcaaagcgtctacattgaggcgcaatcctcacctgacgatgaacgttacgtttttgcctataccgtaaccatccgcaatctgggtcgggcgccagtgcagctattgggccgctactggctgattaccaatggtcatggccgtgaaactgaagtccagggcaaaggtgtggttggcgtccagccgcgcattgcgcctggcgaagagtatcagtacaccggcggcgcggtaattgaaacgccgctgggcaccatgcagggtcattacgaaatgatcgatgaaaatggcgacgcctttaccatcgacattcccgtgtttcgactcgccgtccctacactcattcactaa

SEQ ID NO: 4861 - protein, 125 aa, Salmonella enterica subsp. enterica serovar Typhi str. CT18
MINSPRVCIQVQSVYIEAQSSPDDERYVFAYTVTIRNLGRAPVQLLGRYWLITNGHGRETEVQGKGVVGVQPRIAPGEEYQYTGGAVIETPLGTMQGHYEMIDENGDAFTIDIPVFRLAVPTLIH

SEQ ID NO: 4862 - DNA, 378 bp, Salmonella enterica subsp. enterica serovar Typhimurium str. LT2
  CDS (1)..(378): transl_table=11
atgatcaattcgcccagagtgtgtattcaggtgcaaagcgtctacattgaggcgcaatcctcacctgacgatgaacgttacgtttttgcctataccgtaaccatccgcaatctgggccgggcgccagtgcagctattgggccgctactggctgattaccaatggtcatggccgtgaaaccgaagtccagggcgaaggtgtggttggcgtccagccgcgcattgcgcctggcgaagagtaccagtacaccagcggcgcggtaattgaaacgccgctgggcaccatgcagggtcattacgaaatgatcgatgaaaatggcgacgcctttaccatcgacatccccgtgtttcgactcgccgtccctacactcattcactaa

SEQ ID NO: 4863 - protein, 125 aa, Salmonella enterica subsp. enterica serovar Typhimurium str. LT2
MINSPRVCIQVQSVYIEAQSSPDDERYVFAYTVTIRNLGRAPVQLLGRYWLITNGHGRETEVQGEGVVGVQPRIAPGEEYQYTSGAVIETPLGTMQGHYEMIDENGDAFTIDIPVFRLAVPTLIH

SEQ ID NO: 4864 - DNA, 375 bp, Ralstonia solanacearum GMI1000
  CDS (1)..(375): transl_table=11
atgtcccgctacgaactcaccgtccaggtccggacgcgctacctgcctgagcaatccgagccctcgcaggaccagtacgcctttgcctacaccatcactatccgcaatacgggcgaggtaccgagccagctggtctcgcggcactgggtcatcaccgacgcggagagccacgtgcaggaggtcgccggcctcggcgtggtcggccaccagccgctgctgccgccgggcgaatcgttcgagtacaccagctgggcgaccatcaagacgccggtgggcaccatgcgcggcgaatacttctgcgtggccgaggacggccatcgcttcgaggcgccgattcccgagtttgcgctggcgatgccgcgcatgctgcattga

SEQ ID NO: 4865 - protein, 124 aa, Ralstonia solanacearum GMI1000
MSRYELTVQVRTRYLPEQSEPSQDQYAFAYTITIRNTGEVPSQLVSRHWVITDAESHVQEVAGLGVVGHQPLLPPGESFEYTSWATIKTPVGTMRGEYFCVAEDGHRFEAPIPEFALAMPRMLH

SEQ ID NO: 4866 - DNA, 384 bp, Xanthomonas axonopodis pv. citri str. 306
  CDS (1)..(384): transl_table=11
atgcaagatgatccgcgctaccgggtcgaggtcgaggtatcgccccgcttcctcgcccatcaatccaccccggacgaaggccgctatgcctttgcctacagcatccgcatccagaatgcgggcgcggtgcctgcgcgcctggtcgcgcgccattggcagatcaccgatggcaacggacgcaccgagcaggtggatggcgaaggggtggtcggcgaacagccgtggctgcgcccgggcgaagcgttccattacacctctggcgtactgctggagaccgagcagggacagatgcaaggccactacgacatggtggccgacgatggcaccgaatttatcgccccgatcgccgccttcgtgctgagcgtgcccaggacgctgcactga

SEQ ID NO: 4867 - protein, 127 aa, Xanthomonas axonopodis pv. citri str. 306
MQDDPRYRVEVEVSPRFLAHQSTPDEGRYAFAYSIRIQNAGAVPARLVARHWQITDGNGRTEQVDGEGVVGEQPWLRPGEAFHYTSGVLLETEQGQMQGHYDMVADDGTEFIAPIAAFVLSVPRTLH

SEQ ID NO: 4868 - DNA, 378 bp, Yersinia pestis KIM
  CDS (1)..(378): transl_table=11
atgattgaacagccccgtatttgtgtgcaggtacacagtatctatgtggaaacgcaatcgatacccgaagaggaacgtttcgtcttcgcctataccgttaccgttcgtaatttagggcgttcaaacgtgcaactgcttggccgctattggttaattaccaatagcaatggccgccagactgaagttcagggagaaggggttatcggcgaacaaccacttatcctgccaggtaatgaatttcaatacaccagcggtgccgttctggaaactccgctgggtactatggaaggacattatgaaatgattgatcaccttggacaggccttccgtactgtaattccggtattccgcttagcgatcccagccctgatccactaa

SEQ ID NO: 4869 - protein, 125 aa, Yersinia pestis KIM
MIEQPRICVQVHSIYVETQSIPEEERFVFAYTVTVRNLGRSNVQLLGRYWLITNSNGRQTEVQGEGVIGEQPLILPGNEFQYTSGAVLETPLGTMEGHYEMIDHLGQAFRTVIPVFRLAIPALIH

SEQ ID NO: 4870 - DNA, 381 bp, Shewanella oneidensis MR-1
  CDS (1)..(381): transl_table=11
atgagcgcattggataactctatccgagtcgaagtcaaaaccgagtacattgaacaacaatcctcacctgaggatgagaaatacctctttagctacactatcaccattattaacctcggtgagcaagccgcaaaactcgaaacccgtcactggatcattaccgacgctaacggcaaaaccagtgaagtacaaggtgcgggtgttgtcggtgaaacgcccaccattcctccaaataccgcttaccaatataccagtggcacagtactcgataccccctttggcattatgtatggcacttatggtatggtcagcgaatcgggcgagcattttaacgctataattaagccgttccgcttagccacccctggcttattacattga

SEQ ID NO: 4871 - protein, 126 aa, Shewanella oneidensis MR-1
MSALDNSIRVEVKTEYIEQQSSPEDEKYLFSYTITIINLGEQAAKLETRHWIITDANGKTSEVQGAGVVGETPTIPPNTAYQYTSGTVLDTPFGIMYGTYGMVSESGEHFNAIIKPFRLATPGLLH

SEQ ID NO: 4872 - DNA, 381 bp, Pseudomonas putida KT2440
  CDS (1)..(381): transl_table=11
atgtccgacccccgctatcaaatcgacgtcagcgtcgtgacccgctacctgaaagaacaatccgaccccgaaaacagtcgcttcgctttcgcctacaccattaccgtgcagaacaacggctcgctcagtgccaagttgctgtcgcgccactggctgatcaccaacggtgacggcgaggtagaggaagtacgcggcgccggcgtggtcggccagcaacccaacatcgaccctggccagagccacacttacagcagtggtgccgtcatcagcacccgcgttggcaccatgcagggcagctaccagatgttcgccgaggacggtaagcgcttcgacgccgagattgcccccttccggctggcagtgcccggagcgctgcactga

SEQ ID NO: 4873 - protein, 126 aa, Pseudomonas putida KT2440
MSDPRYQIDVSVVTRYLKEQSDPENSRFAFAYTITVQNNGSLSAKLLSRHWLITNGDGEVEEVRGAGVVGQQPNIDPGQSHTYSSGAVISTRVGTMQGSYQMFAEDGKRFDAEIAPFRLAVPGALH

SEQ ID NO: 4874 - DNA, 381 bp, Vibrio vulnificus CMCP6
  CDS (1)..(381): transl_table=11
atggacgtatctcaaccccgtatccaaattcaagttcacaccaaatacgtcgaagaacaatccaatcctgaacttgctcgctatatcttcgcttacatcattaccattaaaaaccacagttcagagagcgtgcaactgcttagtcgacgctggttgatcaccgatgccaatggcaaacagatctctgtcgaaggcgatggcgtcgtcggccaacaaccgtttatcgacgctggtgatgagtacacttacagcagtggcaccgcattagacaccccagttggcgtcatgcaaggtcaatacatcatgcacgacgctcaaggcaaagaatttgtcgtcgaaattgaacctttccgcctcgcggttcccaacattcttaactga

SEQ ID NO: 4875 - protein, 126 aa, Vibrio vulnificus CMCP6
MDVSQPRIQIQVHTKYVEEQSNPELARYIFAYIITIKNHSSESVQLLSRRWLITDANGKQISVEGDGVVGQQPFIDAGDEYTYSSGTALDTPVGVMQGQYIMHDAQGKEFVVEIEPFRLAVPNILN

SEQ ID NO: 4876 - DNA, 381 bp, Pseudomonas syringae pv. tomato str. DC3000
  CDS (1)..(381): transl_table=11
atgtccgattctcgttacaaggtcgacgtcagcgtcgtcacgcgcttcctcgcagaacaatcgcaacccgagcagaaccgcttcgctttcgcctacaccatcaccgtgcacaataacggcgagttgcctgccaagctgctgtcacggcactggatcatcaccgatggcgacggtcatgtcgaagaagtgcgtggcgaaggggtggtcggtcaacaaccgttgatcaaggtcgggcaaagccatacttacagcagcggcacggtaatgaccactcaggtgggcaatatgcagggcagctaccagatgctggctgaagacggcaaacgcttcgatgcggtgatagaacccttccgtctcgccgttccgggctcactgcactga

SEQ ID NO: 4877 - protein, 126 aa, Pseudomonas syringae pv. tomato str. DC3000
MSDSRYKVDVSVVTRFLAEQSQPEQNRFAFAYTITVHNNGELPAKLLSRHWIITDGDGHVEEVRGEGVVGQQPLIKVGQSHTYSSGTVMTTQVGNMQGSYQMLAEDGKRFDAVIEPFRLAVPGSLH

SEQ ID NO: 4878 - DNA, 381 bp, Vibrio parahaemolyticus RIMD 2210633
  CDS (1)..(381): transl_table=11
atggacgtcattcaaccctgcatcaagattcaagttcacaccaaatacatcgaagagcaatccaatccagagctacaacgctttgttttcgcctacgtcattaccattaaaaacctcagccaacagacagtgcagctcataagtcgccgatggttgattaccgattccaacggtaaacaaatgacggtagagggagaaggtgttgttgggcagcagccgtttattccaagcaacgatgaatacacttacagcagtggtaccgcgttagaaacgcctgttggtgtcatgcaaggacactacaaaatgctggatgaaaaaggccaggaattcatcactgaaattgagccatttcgtttagcgattccgaacgttttaaattaa

SEQ ID NO: 4879 - protein, 126 aa, Vibrio parahaemolyticus RIMD 2210633
MDVIQPCIKIQVHTKYIEEQSNPELQRFVFAYVITIKNLSQQTVQLISRRWLITDSNGKQMTVEGEGVVGQQPFIPSNDEYTYSSGTALETPVGVMQGHYKMLDEKGQEFITEIEPFRLAIPNVLN

SEQ ID NO: 4880 - DNA, 384 bp, Nitrosomonas europaea ATCC 19718
  CDS (1)..(384): transl_table=11
atggaaaacgaacgaaaatatagcatcaaggtggaagtacgcacaatttatttaccagatcagtctgatcccgaggcggagcggtacgtgtttgcttataccattacgatcaacaataccggcagtgtggcttcacaactggtgagccgccactggatcatcaccagcggggatggcgttacgcgtgaagtgcgcgggctgggcgtagtcggcgagcaacccttgctcaaacccggtgaaacctttgaatataccagcggaaccgcgatttcatcgattgccggttcgatgaagggctcctatcagatggtggctgaagacggttttcatttttcggtggaaattcctgaattcatcctgagcgtgccgcgcgtgctgcactga

SEQ ID NO: 4881 - protein, 127 aa, Nitrosomonas europaea ATCC 19718
MENERKYSIKVEVRTIYLPDQSDPEAERYVFAYTITINNTGSVASQLVSRHWIITSGDGVTREVRGLGVVGEQPLLKPGETFEYTSGTAISSIAGSMKGSYQMVAEDGFHFSVEIPEFILSVPRVLH

SEQ ID NO: 4882 - DNA, 396 bp, Bordetella pertussis Tohama I
  CDS (1)..(396): transl_table=11
gtgtcgaaccgggaaaggcctgtgaaaccctatgatctgaccgtatccgtgaccccgcgttatgtgccggagcagtccgatcccagtcagcagcaatacgtgtttgcctacacggtgcgcatcaccaataccggttcgcacccggcccaggtcatcagtcgccactggatcatcaccgacggcgaggagcgcgtgcaggaagtgcgcggccttggcgtggtgggccagcaaccgctgctggcgccgggcgaaaccttcgaatacaccagcggctgtccgcttccgactcccatcggcacgatgcggggcacctaccattgcgtgggcgaaaacggcattccgttcgaggtgccgattgcggagttcctgctggccatgccgcgtacactgcactga

SEQ ID NO: 4883 - protein, 131 aa, Bordetella pertussis Tohama I
MSNRERPVKPYDLTVSVTPRYVPEQSDPSQQQYVFAYTVRITNTGSHPAQVISRHWIITDGEERVQEVRGLGVVGQQPLLAPGETFEYTSGCPLPTPIGTMRGTYHCVGENGIPFEVPIAEFLLAMPRTLH

SEQ ID NO: 4884 - DNA, 375 bp, Bordetella bronchiseptica RB50
  CDS (1)..(375): transl_table=11
gtgaaaccctatgatctgaccgtatccgtgaccccgcgttatgtgccggagcagtccgatcccagtcagcagcaatacgtgtttgcctacacggtgcgcatcaccaataccggttcgcacccggcccaggtcatcagccgccactggatcatcaccgacggcgaggagcgcgtgcaggaagtgcgcggccttggcgtggtgggccagcaaccgctgctggcgccgggcgagaccttcgaatacaccagcggctgtccgcttccgacccccatcggcacgatgcggggtacctaccattgcgtcggcgaaaacggcattccgttcgaggtgccgatcgcggagttcctgctggccatgccgcgtacactgcactga

SEQ ID NO: 4885 - protein, 124 aa, Bordetella bronchiseptica RB50
MKPYDLTVSVTPRYVPEQSDPSQQQYVFAYTVRITNTGSHPAQVISRHWIITDGEERVQEVRGLGVVGQQPLLAPGETFEYTSGCPLPTPIGTMRGTYHCVGENGIPFEVPIAEFLLAMPRTLH

SEQ ID NO: 4886 - DNA, 378 bp, Photorhabdus luminescens subsp. laumondii TTO1
  CDS (1)..(378): transl_table=11
atgattaatacgcccagggtttctattcaggtacaaagtgtttatgtagaaagccaatcgtgtcccgatcaacggcgtttcgtttttgcctatacaattactattcgaaatcttgggcgcgaacgggtccaattaattaatcgttactggctgattaccaacagcgacagccatcaaacggaagttcaaggggaaggtgttgttggtgagcaacccataatccagccaggtaccgaataccgttacaccagcggggcgatattggaaacgcccttgggtactatggaaggccattatgaaatgattgatcacaatggtgaaccatttcgcgttgctattccggttttccgtctggctatcccaacgctgattaattga

SEQ ID NO: 4887 - protein, 125 aa, Photorhabdus luminescens subsp. laumondii TTO1
MINTPRVSIQVQSVYVESQSCPDQRRFVFAYTITIRNLGRERVQLINRYWLITNSDSHQTEVQGEGVVGEQPIIQPGTEYRYTSGAILETPLGTMEGHYEMIDHNGEPFRVAIPVFRLAIPTLIN

SEQ ID NO: 4888 - DNA, 429 bp, Bdellovibrio bacteriovorus HD100
  CDS (1)..(429): transl_table=11
ttgacgtttttcacggtcaaatttattctgaatgtcactatggcaatgcaaaaaacttcaatccctgatttccagatcaccgcgaaagtcgtctacgtaccgtctgagtcgcgtcctgatgaaggctaccatttctttgcctataaaattactatcaccaacacaggatcaacccctgcccaactgatgagccgtcactgggtcatcaccgatgcgttgggtaaaaaagaagaagtccgcggccctggtgttgtcggattacagcctaaaattcaacctggtcagacctttgaatacgacagcgcctgcccactgacaacctccaccggcagcatggtgggacgctatttcttcgtgggcgaaagtggcgaaagcttctctgtggaagttcccgagttctatctgattgcccctttggcactgcattaa

SEQ ID NO: 4889 - protein, 142 aa, Bdellovibrio bacteriovorus HD100
MTFFTVKFILNVTMAMQKTSIPDFQITAKVVYVPSESRPDEGYHFFAYKITITNTGSTPAQLMSRHWVITDALGKKEEVRGPGVVGLQPKIQPGQTFEYDSACPLTTSTGSMVGRYFFVGESGESFSVEVPEFYLIAPLALH

SEQ ID NO: 4890 - DNA, 651 bp, Hydra magnipapillata
  CDS (1)..(651)
atgacaatttataaagatgctaaaaatattgatcctattaatttggcaagagctatgtcttcgttagattgctggtcagagcaacaggaggaaaattggcaaacatgggatattgatagatgcaagaatgatttcttaaacgccatgcataatgtttatgaaaaaatatctgctcaggaaaatgagcaggaaacttcagataacaaagataataatttagaaaatgaaacaaaagacgaatatattgatcttctttcaatgtattccaaaactacaaaaaaaataaatattactgttaagccttattatcttgaagatcaatctgagcccgaagatcggcattatgtatgggcttataaagtaataatagataaccaaggtaatgaaaaagtacagcttgtaaacaggcattggaaaattattgatgctaatggtactcttcaagaagtacgaggtaaaggtgtagtaggtgaacaacctatattaaatccaggtgaaaagtttgagtatactagtggcacacctttaactacttcttcaggcttcatggaaggaagttatgagatgcaaggtgatgatggaaattcttttgatgttcaaatacctcagttttcattagatacaccatttgaaaataataaattaaattaa

SEQ ID NO: 4891 - protein, 216 aa, Hydra magnipapillata
MTIYKDAKNIDPINLARAMSSLDCWSEQQEENWQTWDIDRCKNDFLNAMHNVYEKISAQENEQETSDNKDNNLENETKDEYIDLLSMYSKTTKKINITVKPYYLEDQSEPEDRHYVWAYKVIIDNQGNEKVQLVNRHWKIIDANGTLQEVRGKGVVGEQPILNPGEKFEYTSGTPLTTSSGFMEGSYEMQGDDGNSFDVQIPQFSLDTPFENNKLN

SEQ ID NO: 4892 - DNA, 834 bp, Vitis vinifera
  CDS (1)..(834)
atgcatgcattgagtttcaaagggtttcccgatttgaacgttggcagggagcgctcttggcctggccgactgtaccattgtacagggacgagaaaggatggttggaattgtagggattttaggagaaattgcaggatttttgcttgttcttcgggggcaaatggggagaatcagagcccgagttcgtttctttctcgcagtcaaacttacgctcttctgaagcagcaactgcaggttgctgcaaaatctgaggattacaaagaagctgctagactacgcgattcattgagattatttgaggaagaggagccggttttgcgtcttcgcagattgattaaagaggcagtcgccgatgagaggtttgaggatgcagctagataccgtgatgagcttaaggaaattgcaccgcattctctcttaaaatgttcaagtgacgcaacaaccgtggggatcagggttcaagttagaagtgtgtacattgaaggtcgaagtcagccttcaaaagggcagttcttttttgcgtatagaataagaattaccaataactcagaccgccctgttcaacttctcagaaggcattggattataacagatgcaaatggaaaaattgagcatgtctgggggattggtgtcataggtgaacagccagttatacttcctagaaccggttttgagtactcatctgcatgcccattaagcactccaaatggaagaatggagggtgactttgaaatgaaacatattgacaaagtgggttctcagactttcaatgtggcaattgccccattttctctctccacactcggagatgagtctgatacatttgagatgtga

SEQ ID NO: 4893 - protein, 277 aa, Vitis vinifera
MHALSFKGFPDLNVGRERSWPGRLYHCTGTRKDGWNCRDFRRNCRIFACSSGANGENQSPSSFLSRSQTYALLKQQLQVAAKSEDYKEAARLRDSLRLFEEEEPVLRLRRLIKEAVADERFEDAARYRDELKEIAPHSLLKCSSDATTVGIRVQVRSVYIEGRSQPSKGQFFFAYRIRITNNSDRPVQLLRRHWIITDANGKIEHVWGIGVIGEQPVILPRTGFEYSSACPLSTPNGRMEGDFEMKHIDKVGSQTFNVAIAPFSLSTLGDESDTFEM

SEQ ID NO: 4894 - DNA, 858 bp, Populus trichocarpa
  CDS (1)..(858)
atgcagtcactcaatctgaaattgttaacggattttagtacgggtgcgaggaggtatgttccgggtcggagcttcggtacggagtggagacagtgtttgaatttgaggaattacagccgaaattgtcggattgtagcatgttctgttgagagagatggagggggtgaaggagcaagttcaagttcgagttcgagttcggaccctagtccgagttcctttttgtctcgcagtcaaacttatgctatgctcaaacaacaaatggaggttgctgcacaatctgaggactatgaagaagctgcaagacttcgtgattcattgagatcatttgaggaagtggaaccagttttgcggcttcgtaggttgcttaaggaggcagttgctgatgagcggtttgaggatgcaactaggtatcgcgatgagctaaaggaaattgcaccactttctctcttgaaatgttcaagtgatgcaactaccttggggataagggttcaagttaggagcgtgtacattgagggccgaagtcagccttcaaaggggcagtacttctttgcatatagaataagaatcactaataactcagatcgccctgttcaacttctcagaagacactggattatcacagatgccaatggaaaaactgaaaatttttggggagttggagttataggtgaacagccggttatacttcctaggacaggatttgaatactcatctgcatgcccactttgcactcccaatggtagaatggaaggtgactttgagatgaaacacattgacaaagctggctcacccacgttcaatgttgctattgcaccgttctctctctcaatactaggagatggaagtgatgctttttga

SEQ ID NO: 4895 - protein, 285 aa, Populus trichocarpa
MQSLNLKLLTDFSTGARRYVPGRSFGTEWRQCLNLRNYSRNCRIVACSVERDGGGEGASSSSSSSSDPSPSSFLSRSQTYAMLKQQMEVAAQSEDYEEAARLRDSLRSFEEVEPVLRLRRLLKEAVADERFEDATRYRDELKEIAPLSLLKCSSDATTLGIRVQVRSVYIEGRSQPSKGQYFFAYRIRITNNSDRPVQLLRRHWIITDANGKTENFWGVGVIGEQPVILPRTGFEYSSACPLCTPNGRMEGDFEMKHIDKAGSPTFNVAIAPFSLSILGDGSDAF

SEQ ID NO: 4896 - DNA, 471 bp, Populus trichocarpa
  CDS (1)..(471)
atgggcggcggcgcgtggggacgttcgcaagccggtacattgcgggcagttaccattgccgccatgcccatgaacgagttccaggtccaggtccgccccgcctttttgccagagcaatccgctccagcggcgggcgtatacgccttctcctacacgatcaccgtgaccaataccggccaggtgccgggccagttgatcgcgcgccactggatcatcaccaacgaactgggccatgtcgaagaggtcaagggcctgggggtgatcggccgccagccgctgctgcagcccggcgagaccttcgagtacaccagcggctgccagctgcgcacgcccaacggcagcatgcagggcagctatctgtgcatcagccacgagggcgaggtcttcgagtgccccatcccgcgctttcatctgcagtcgggcgctggcggcgacagctttccggaccctgacaaccgcgtgctgcactga

SEQ ID NO: 4897 - protein, 156 aa, Populus trichocarpa
MGGGAWGRSQAGTLRAVTIAAMPMNEFQVQVRPAFLPEQSAPAAGVYAFSYTITVTNTGQVPGQLIARHWIITNELGHVEEVKGLGVIGRQPLLQPGETFEYTSGCQLRTPNGSMQGSYLCISHEGEVFECPIPRFHLQSGAGGDSFPDPDNRVLH

SEQ ID NO: 4898 - DNA, 378 bp, Yersinia enterocolitica subsp. enterocolitica 8081
  CDS (1)..(378): transl_table=11
atgattgaacagccccgcgtttgtgtacaggtgcaaagtatctatgtggaaacccagtcgataccagacgaggaacgtttcgtctttgcctataccgtgacgattcgtaatctgggccgttcaaatgtgcaactcatgggccgctattggttaattactaatagcaatggccgacagacagaagttcagggcgaaggagttatcggtgaacagccgttgatcctgccaggtaacgagttccaatacaccagcggggccgtgctagaaacgccgctgggtaccatggaagggcattatgagatggttgatcaccttggtcaggcgttccgtactgtgattccggtgttccgcttagcgatcccaacactaatccattaa

SEQ ID NO: 4899 - protein, 125 aa, Yersinia enterocolitica subsp. enterocolitica 8081
MIEQPRVCVQVQSIYVETQSIPDEERFVFAYTVTIRNLGRSNVQLMGRYWLITNSNGRQTEVQGEGVIGEQPLILPGNEFQYTSGAVLETPLGTMEGHYEMVDHLGQAFRTVIPVFRLAIPTLIH

SEQ ID NO: 4900 - DNA, 375 bp, Methylibium petroleiphilum PM1
  CDS (1)..(375): transl_table=11
atggcacgtcccgagttcaccatcagcgtcgtcgcgcgctacctgcccgagcaatcggcccccgagcaacaggcgtacgcgttctcgtactcggtgaccatcgtcaacagcggcgatgtgcccgcccagctgatcggccgccactggctgatcaccgacgccagcggcgcccggcaggaggtacgcggcctgggcgtcatcggccagcagccgctcctgcagcccggtgagcagttcgaataccagagctgggcccgcattgccgcgcctcgcggccagatgcagggcagctacttctgcatgagcgccgacgcacaggccttcgaggccgcgatcccgccgttcgagctgtcgcagcactcggcgctgcattga

SEQ ID NO: 4901 - protein, 124 aa, Methylibium petroleiphilum PM1
MARPEFTISVVARYLPEQSAPEQQAYAFSYSVTIVNSGDVPAQLIGRHWLITDASGARQEVRGLGVIGQQPLLQPGEQFEYQSWARIAAPRGQMQGSYFCMSADAQAFEAAIPPFELSQHSALH

SEQ ID NO: 4902 - DNA, 381 bp, Shewanella loihica PV-4
  CDS (1)..(381): transl_table=11
atgaaacaactcgaatcctcaatcaggattgaggtcaaaaccgactatatcgaagagcaatcttcgcccgaagaagagagatacctgttcagctacaccatcaccatcatcaacttaggggatgaagccgtcaccctgaagagccgcatgtggtgcatcacagacgccaatggccatgagagtaaggttgaaggcgcaggtgtggttggcgagacccctaccatcaagccaaataccgcctaccagtacaccagtggcacggtatgcgagacgccctttgccgtcatgcagggctactatgtgatggtgaccgaacagggtgaaaccttcaaggcacccatcgcccccttccgtctagcggcccccggcctgctgcattaa

SEQ ID NO: 4903 - protein, 126 aa, Shewanella loihica PV-4
MKQLESSIRIEVKTDYIEEQSSPEEERYLFSYTITIINLGDEAVTLKSRMWCITDANGHESKVEGAGVVGETPTIKPNTAYQYTSGTVCETPFAVMQGYYVMVTEQGETFKAPIAPFRLAAPGLLH

SEQ ID NO: 4904 - DNA, 375 bp, Herminiimonas arsenicoxydans
  CDS (1)..(375): transl_table=11
atggcatcctacgaatttaccgtgaccgtcaatacacagtacctggaagagcaatccgatccggcgcactccaattatgtattcgcgtacgcagtcaccatcaagaataccgggcaggtagcggcgcaacttatttcgcgccattgggtcattaccgatgccaacaaccatattgaagaggtgcgcggcctgggtgtagtcggcaatcagcctttgctgcagccgggcgaacagtttgaatacaccagcggcacctcgatggccacgccgcaaggctcgatggccggcgaatatttctgcgtggcggaagatggcgagcaattcgaggcgaaaattcctgaattcgtcctgtccctgccacgcaccttgcattaa

SEQ ID NO: 4905 - protein, 124 aa, Herminiimonas arsenicoxydans
MASYEFTVTVNTQYLEEQSDPAHSNYVFAYAVTIKNTGQVAAQLISRHWVITDANNHIEEVRGLGVVGNQPLLQPGEQFEYTSGTSMATPQGSMAGEYFCVAEDGEQFEAKIPEFVLSLPRTLH

SEQ ID NO: 4906 - DNA, 408 bp, Burkholderia vietnamiensis G4
  CDS (1)..(408): transl_table=11
atggcgcgggcggttacctacagcggaaacaccatgagtcagtatcagttcaccgtttcggtgaaaaccagttacttgccggaacaatccgacccggatcgacgtcaatacgcattcgcgtacacgctgaccatccgcaatacggggcaggttgcagcgcaactgatcgcccgtcactggatcatcacggacagcgaaaatcacgtgcaggaagtgaaggggctcggcgtcgtcgggcaccagccgctgctgcagccgggcgaacatttcgagtacacgagctgggccgtgatcgcgacgccggtcggcacgatgcgcggtgcgtatttctgtgtggcggaagacggtgagcggttcgaggcgcccgtcgaagaatttgcgctgcacatgccgcgcacgctgcattga

SEQ ID NO: 4907 - protein, 135 aa, Burkholderia vietnamiensis G4
MARAVTYSGNTMSQYQFTVSVKTSYLPEQSDPDRRQYAFAYTLTIRNTGQVAAQLIARHWIITDSENHVQEVKGLGVVGHQPLLQPGEHFEYTSWAVIATPVGTMRGAYFCVAEDGERFEAPVEEFALHMPRTLH

SEQ ID NO: 4908 - DNA, 375 bp, Polynucleobacter necessarius subsp. asymbioticus QLW-P1DMWA-1
  CDS (1)..(375): transl_table=11
atgaatccccacgaaattagcattacggtcaaagcccagtacctccctgaccaatccgacccggataaccgtcaatttgcctttgcatacacaatcacaatctgtaatacgggggcggcgagcattcaactcattgcccgccattggtttattacggatggggacaatgatgtccaggaagtccgtggtttgggggttgtgggccagcagcctttattgcgttccggggagcattttgagtacaccagttgggctactttgcccacacctgctggaacaatgcgcggcgaatacttctgcgtgactgaggaggcacaattttttcaagcgcccattcccgagtttgctttagtcatgccccgtaccctccactaa

SEQ ID NO: 4909 - protein, 124 aa, Polynucleobacter necessarius subsp. asymbioticus QLW-P1DMWA-1
MNPHEISITVKAQYLPDQSDPDNRQFAFAYTITICNTGAASIQLIARHWFITDGDNDVQEVRGLGVVGQQPLLRSGEHFEYTSWATLPTPAGTMRGEYFCVTEEAQFFQAPIPEFALVMPRTLH

SEQ ID NO: 4910 - DNA, 384 bp, Pseudomonas stutzeri A1501
  CDS (1)..(384): transl_table=11
atgaccgaagacccacgctaccgcatcgacgtcagcgtcacgccccgctatctggccgcgcaatccgagccggaacaaaaccgctatgcctttgcctacaccgtaaccatcgagaacaaaggcgaggtggcggcgcagctgctgtcgcgacactggatcatcaccgacggcgacggccacgtgcaggaagtgcgtggcaccggcgtcatcggcgaacaaccgttgatcgcaccgggcgagcaccacgtctacaccagcggcacgttgctgccgacctgtgtcggcagcatgcagggcagctatcagatggtggccgaggacggtcacagcttcgatgccgtcatcgcaccgttccgccttgccgtacccggagcattgcattga

SEQ ID NO: 4911 - protein, 127 aa, Pseudomonas stutzeri A1501
MTEDPRYRIDVSVTPRYLAAQSEPEQNRYAFAYTVTIENKGEVAAQLLSRHWIITDGDGHVQEVRGTGVIGEQPLIAPGEHHVYTSGTLLPTCVGSMQGSYQMVAEDGHSFDAVIAPFRLAVPGALH

SEQ ID NO: 4912 - DNA, 378 bp, Enterobacter sp. 638
  CDS (1)..(378): transl_table=11
atgattgattcgccccgcgtctgtgttcaggtacaaagcgtctacatcgaatcgcagtccacgccggacgatgaacgttttgtttttgcttacaccgtaaccattcgcaatctggggcggatgcctgtgcaactgctcgggcgttactggcttatcaccaacggcaatggccgcgaaatcgaagtccagggtgaaggtgtggtcggcgaacagccccacatcgcccctggcgaagagtttcaatacaccagcggtgccgttattgaaacaccgatgggtaccatgcagggccattatgaaatggttgatgtcgacggcaatgccttccgcgttgcggtccctgttttccgcctcgctgttcctacatttatccattaa

SEQ ID NO: 4913 - protein, 125 aa, Enterobacter sp. 638
MIDSPRVCVQVQSVYIESQSTPDDERFVFAYTVTIRNLGRMPVQLLGRYWLITNGNGREIEVQGEGVVGEQPHIAPGEEFQYTSGAVIETPMGTMQGHYEMVDVDGNAFRVAVPVFRLAVPTFIH

SEQ ID NO: 4914 - DNA, 381 bp, Pseudomonas mendocina ymp
  CDS (1)..(381): transl_table=11
atgtccgaccctcgttatcagatcgacgtcagcgtcaccacccgctatctggctgcgcaatcgcagccggagcagaaccgttatgcgttctcctacaccgtgaccatcgtcaacaatggccagctgccagccaaactgctgtcgcgccactggatcatcaccgatggcgacggccgcgtgcaggaagtacgaggcgccggggtcgtgggccagcagcccgatatcgccccgggcgccagccacacctacagcagcggcacggtgatggccacgcaggtcggcatcatgcagggcagctatcagatgctcgccgaagacggcaaacgcttcgatgcgaccatcgcgccgttccgtctggccgtaccgggagcccttcactga

SEQ ID NO: 4915 - protein, 126 aa, Pseudomonas mendocina ymp
MSDPRYQIDVSVTTRYLAAQSQPEQNRYAFSYTVTIVNNGQLPAKLLSRHWIITDGDGRVQEVRGAGVVGQQPDIAPGASHTYSSGTVMATQVGIMQGSYQMLAEDGKRFDATIAPFRLAVPGALH

SEQ ID NO: 4916 - DNA, 474 bp, Acidiphilium cryptum JF-5
  CDS (1)..(474): transl_table=11
gtgaagaggggccggaaccggcccgcaacgacgagacgtccacgcatgaccagccaccgccccgacccgaccggcgccctgttcgtcaacgaggatgcccgcatcagggtgagcatccgggcgatcttcctcgaggaccagtcccgtccggaggagcggcatttcgtctgggcgtatcaggtgcggatcgagaatgtcggccaggtgacggcgcagctcatgatgcggacctggacgatcaccgacggcaacggccatgtccagcacgttcacggccccggcgtggtcggcgagcagccggtgctcgaccctggcgacgccttcgaatacacctccggcacgccgctggagacgccctcgggcttcatgaccgggatcttccacatggtggcggtggacagcggcgaggaattcgacgtgccgacgccgggcttcagcctcgacagcccgcacgcggaccagcggcggcactga

SEQ ID NO: 4917 - protein, 157 aa, Acidiphilium cryptum JF-5
MKRGRNRPATTRRPRMTSHRPDPTGALFVNEDARIRVSIRAIFLEDQSRPEERHFVWAYQVRIENVGQVTAQLMMRTWTITDGNGHVQHVHGPGVVGEQPVLDPGDAFEYTSGTPLETPSGFMTGIFHMVAVDSGEEFDVPTPGFSLDSPHADQRRH

SEQ ID NO: 4918 - DNA, 405 bp, Sphingomonas wittichii RW1
  CDS (1)..(405): transl_table=11
gtgatcatgcaggccctcttcccgcatgtcgcgcagacccgcagcgtggtcgtgcgggtggcggtgtccttcatgcccgaacagtcggaaccggcgcgcggccgctggttctggtcctaccatatccgcatcgagaatgaggggaagcaggccgtccagctcctcacccgccactggctgatcaccgacgggcgcggcgtcaagcacgacgtgcgcggcgagggcgtggtcggcgagcagccggtgatcgagccgggccaggcctatgactatgtctcgggctgcccgctccagacccctacgggctcgatggagggcagctaccacatggtcgcggaagacggatcgaccttcgaggcggcgatcccgcgcttcccgctgatcggcccggcggtggccttgtaa

SEQ ID NO: 4919 - protein, 134 aa, Sphingomonas wittichii RW1
MIMQALFPHVAQTRSVVVRVAVSFMPEQSEPARGRWFWSYHIRIENEGKQAVQLLTRHWLITDGRGVKHDVRGEGVVGEQPVIEPGQAYDYVSGCPLQTPTGSMEGSYHMVAEDGSTFEAAIPRFPLIGPAVAL

SEQ ID NO: 4920 - DNA, 360 bp, Klebsiella pneumoniae subsp. pneumoniae MGH 78578
  CDS (1)..(360): transl_table=11
gtgtgtgtccaggtacagagcgtctatatcgaatcgcagtcttccccggaagaagagcgctacgtcttcgcttacaccgtcaccattcgcaacctggggcggagtcaggttcagctgcttggccgctactggctcatcactaacggccacggtcgtgagactgaagttcagggtgaaggggtggtcggcgagcaaccgtatattcccgccggcggtgaatatcaatataccagcggcgcagtgattgaaacgccgctgggaaccatgcagggtcattatgagatgatcgatatcgacggcgcgccgttccgtattgagatccctgttttccgtctcgcagttccaacgctcattcattaa

SEQ ID NO: 4921 - protein, 119 aa, Klebsiella pneumoniae subsp. pneumoniae MGH 78578
MCVQVQSVYIESQSSPEEERYVFAYTVTIRNLGRSQVQLLGRYWLITNGHGRETEVQGEGVVGEQPYIPAGGEYQYTSGAVIETPLGTMQGHYEMIDIDGAPFRIEIPVFRLAVPTLIH

SEQ ID NO: 4922 - DNA, 381 bp, Pseudomonas aeruginosa PA7
  CDS (1)..(381): transl_table=11
atgagcgacacccagcaccaggtcaacgtccgggtcgacacccgctatcttcccgagcagtccgcgccggagcagaaccgtttcgccttcgcctacacggtgaccatcgagaaccggggcgaggtctcggcccagctactgtcgcgtcactggatcatcaccgacggcgacggccgcacccaggaagtccgtggcgccggcgtggtcggcgagcaaccgctgatcgcccccggcgcgcaacacacctacaccagcggcacggtgctggcgacccgggtcggcagcatgcgcggcagctaccagatgcttggcagcgacggtgtcgccttcgacgccgcgattccggtgttccgcctggccgtgccgggagcgctgcactga

SEQ ID NO: 4923 - protein, 126 aa, Pseudomonas aeruginosa PA7
MSDTQHQVNVRVDTRYLPEQSAPEQNRFAFAYTVTIENRGEVSAQLLSRHWIITDGDGRTQEVRGAGVVGEQPLIAPGAQHTYTSGTVLATRVGSMRGSYQMLGSDGVAFDAAIPVFRLAVPGALH

SEQ ID NO: 4924 - DNA, 375 bp, Janthinobacterium sp. Marseille
  CDS (1)..(375): transl_table=11
atggcatcttatgaatttaccgtgactatcaatacgcaatacctggaggaacagtccgatccggcccgttccaactatgtatttgcctatgcagtgacgatcaagaatacggggcaggtcgcggcgcagctgatttcgcgccattggctgattacagatgccaacaaccatgtgcaggaagtacgcggccttggtgtggtggggaatcagcctttattgcagccgggtgagcagtacgaatacaccagcggtatgtcgatggcgacgccgcagggttccatgaccggggaatacttctgcgttgccgaggatggcgaacagtttgaggtgaagattcccgagtttgtcttgtccctgccgcgtaccctgcattaa

SEQ ID NO: 4925 - protein, 124 aa, Janthinobacterium sp. Marseille
MASYEFTVTINTQYLEEQSDPARSNYVFAYAVTIKNTGQVAAQLISRHWLITDANNHVQEVRGLGVVGNQPLLQPGEQYEYTSGMSMATPQGSMTGEYFCVAEDGEQFEVKIPEFVLSLPRTLH

SEQ ID NO: 4926 - DNA, 393 bp, Ochrobactrum anthropi ATCC 49188
  CDS (1)..(393): transl_table=11
atgtacagagcggtaacgcgggggatcgaagtttcggtcgaacctttctatttggaagaccagtccgagcccgaagaaaaccgttatgtctggggctatcgtataacgattgccaacaactccacggaaaccgtacagcttcgttcgcgttactggcagattaccgatgcgaacgggtatgtcgaggaagtgcgcgggccgggcgtggtcggcgaacaaccaacactcgaaccaggcgactcttttcaatattcatcgggctgcccgttgaccaccacatcgggcgtcatggtcgggcgctatcagatgcagggcaacggcggcagtttgtttgaagtggatatacccgctttctcgctggatattccggaacaaaggcgaactttaaattag

SEQ ID NO: 4927 - protein, 130 aa, Ochrobactrum anthropi ATCC 49188
MYRAVTRGIEVSVEPFYLEDQSEPEENRYVWGYRITIANNSTETVQLRSRYWQITDANGYVEEVRGPGVVGEQPTLEPGDSFQYSSGCPLTTTSGVMVGRYQMQGNGGSLFEVDIPAFSLDIPEQRRTLN

SEQ ID NO: 4928 - DNA, 375 bp, Anaeromyxobacter sp. Fw109-5
  CDS (1)..(375): transl_table=11
gtgtcgaccgccgtcacccagggcatccgcgtcgaggtgcgcagcgcctaccgtccggaccgttccgaggccggccgctggctcttcacctataccgtccgcatcgccaaccagggggagacgccggcgctgctcgcggcgcgccactggatcatcaccgacgcgaacggcgagcgcgaggaggtggtcggcgagggcgtcatcggccagcagccgcagctctcccccggcgacgagttcgagtacacgagcttctgcgtcctggagacgccgcacggctcgatgcagggcagctaccgcatggagcggcccgacggctcgtccttccacgcgcggatcgcgccgttcccgctggtggcggggacgctgaactga

SEQ ID NO: 4929 - protein, 124 aa, Anaeromyxobacter sp. Fw109-5
MSTAVTQGIRVEVRSAYRPDRSEAGRWLFTYTVRIANQGETPALLAARHWIITDANGEREEVVGEGVIGQQPQLSPGDEFEYTSFCVLETPHGSMQGSYRMERPDGSSFHARIAPFPLVAGTLN

SEQ ID NO: 4930 - DNA, 393 bp, Parvibaculum lavamentivorans DS-1
  CDS (1)..(393): transl_table=11
atgtatagcgccatgacccgttcgataaatattcttgtcgagccgacttatctcgaggatcagtcggagcccgaccaggattattatgtctgggcctatcacgtcacgattgaaaacaagggcccggaaacggttcgcctgcgcgcgcgctattggaagatcaccgatgcgacaggccatgtgcatgaagtgcgcggccccggcgtcgtcggcgaacagccgctgctgcgtcccggcgaaaaattcgaatatacgagcggtacgccgctcggcgccccgtcgggcatcatgttcggcaattacgagatggaaacggctgaaggcgaaaaattcgaggtcgatattccggccttctcgctcgacagccctcatgccaagcggatgctgcactga

SEQ ID NO: 4931 - protein, 130 aa, Parvibaculum lavamentivorans DS-1
MYSAMTRSINILVEPTYLEDQSEPDQDYYVWAYHVTIENKGPETVRLRARYWKITDATGHVHEVRGPGVVGEQPLLRPGEKFEYTSGTPLGAPSGIMFGNYEMETAEGEKFEVDIPAFSLDSPHAKRMLH

SEQ ID NO: 4932 - DNA, 393 bp, Xanthobacter autotrophicus Py2
  CDS (1)..(393): transl_table=11
atgtaccgcgccatcactcggaatattcaggtgaccgcgacgccgcgttatgtggcggagcgatcggagcccgaccagggccgtcatttttgggcttataccgtcgaggtggccaatttgggccaggagaccgtgcaactgaagggtcgccactgggtcattaccgacgccaacgggcacaccgaggaggtccacggcgccggtgtcgtgggcgaggagcccaccctgccgcccggcggccgattcgaatacaccagcggcgtgccgctcaacacctccaccgggatcatgagcgggcactacgagatgctggccgacaacggcgagaccttctccatcgagatccccgccttctcgctggatgtgccggacgtgcgccgcgtcctgaactga

SEQ ID NO: 4933 - protein, 130 aa, Xanthobacter autotrophicus Py2
MYRAITRNIQVTATPRYVAERSEPDQGRHFWAYTVEVANLGQETVQLKGRHWVITDANGHTEEVHGAGVVGEEPTLPPGGRFEYTSGVPLNTSTGIMSGHYEMLADNGETFSIEIPAFSLDVPDVRRVLN

SEQ ID NO: 4934 - DNA, 378 bp, Cronobacter sakazakii ATCC BAA-894
  CDS (1)..(378): transl_table=11
atggctgattcaccccgcgtttgcgtacaggtacaaagcgtttatatcgaagcccagtcttcaccggaggatgaacgtttcgtctttgcctataccgtcaccgtccgcaatctggggcgaacgcctgttcagctgctgggccgctactggcttatcaccaacggcaacggtaaagagaccgaagtccagggtgaaggcgtggtaggggttcagccccatatccagcccggcggcgaataccagtacaccagcggcgcggtcattgaaacgccgttcggcacaatgcagggccactacgaaatggtggacgatcagggcaacggttttcaccttgatatcccggttttccgcctcgccgttcccacactgatccattaa

SEQ ID NO: 4935 - protein, 125 aa, Cronobacter sakazakii ATCC BAA-894
MADSPRVCVQVQSVYIEAQSSPEDERFVFAYTVTVRNLGRTPVQLLGRYWLITNGNGKETEVQGEGVVGVQPHIQPGGEYQYTSGAVIETPFGTMQGHYEMVDDQGNGFHLDIPVFRLAVPTLIH

SEQ ID NO: 4936 - DNA, 378 bp, Citrobacter koseri ATCC BAA-895
  CDS (1)..(378): transl_table=11
atgatcaattcgccccgagtgtgtattcaggttcagagcgtctacattgaagcgcaatcttcacctgatgatgaacgttacgtattcgcatacacggtaaccatccgcaatttggggcgagcgccagtgcagttgttggggcgttattggctgataaccaatggtcatggccgcgaaaccgaagtacagggcgaaggtgtggttggcgtacagccgcacatcgcgcccggagaagagtaccagtacaccagcggcgccgttattgaaacgccgctgggcaccatgcagggtcactacgaaatgatcgatgaaaaaggcgtcgcctttactatcgatattcccgtgttccgactcgccgttccaacacttattcattaa

SEQ ID NO: 4937 - protein, 125 aa, Citrobacter koseri ATCC BAA-895
MINSPRVCIQVQSVYIEAQSSPDDERYVFAYTVTIRNLGRAPVQLLGRYWLITNGHGRETEVQGEGVVGVQPHIAPGEEYQYTSGAVIETPLGTMQGHYEMIDEKGVAFTIDIPVFRLAVPTLIH

SEQ ID NO: 4938 - DNA, 381 bp, Shewanella sediminis HAW-EB3
  CDS (1)..(381): transl_table=11
atgacgtcactagaagactccatcaaggtcgaagtaaaaactgaatatattgaaggtcaatcttcccctaccgaagaaaggtacttgttcagatataccatcactatcgttaatctcggtgaaaaagcggtgacactgaagagccgttactggtcaattaccgatgcgaataaccataatagcgaagtgcggggagaaggcgtggttggtgagacgccaacaatagaacctgacagtgcatatcaatataccagtggcacagtactggagactcctttgggggtcatgcaaggcagctacactatgatcaccggcgaaggagagagctttaaggcgcaaatccctcctttcagactcgcagtccctggcatgcttcactga

SEQ ID NO: 4939 - protein, 126 aa, Shewanella sediminis HAW-EB3
MTSLEDSIKVEVKTEYIEGQSSPTEERYLFRYTITIVNLGEKAVTLKSRYWSITDANNHNSEVRGEGVVGETPTIEPDSAYQYTSGTVLETPLGVMQGSYTMITGEGESFKAQIPPFRLAVPGMLH

SEQ ID NO: 4940 - DNA, 378 bp, Serratia proteamaculans 568
  CDS (1)..(378): transl_table=11
atgattgattcgccccgcgtatgtattcaggtacaaagtgtctatgtggaatcacagtcgatacctgaggaagaacgttacgtcttcgcttataccatcaccatccgcaacctggggcgtttcaatgtgcaactgctgggccgctactggctgatcaccaacagcaatggccgtcagaccgaagttcagggcgaaggcgtcgtcggcgaacagccgcttatcccgcccggtggagaattccaatacaccagcggcgcgatccttgaaacgccattgggtaccatggaaggccattacgaaatggttgatcatcagggtcagccgttccagaccgctattccggtgttccgcttagctatcccaacgctgattcactaa

SEQ ID NO: 4941 - protein, 125 aa, Serratia proteamaculans 568
MIDSPRVCIQVQSVYVESQSIPEEERYVFAYTITIRNLGRFNVQLLGRYWLITNSNGRQTEVQGEGVVGEQPLIPPGGEFQYTSGAILETPLGTMEGHYEMVDHQGQPFQTAIPVFRLAIPTLIH

SEQ ID NO: 4942 - DNA, 381 bp, Shewanella pealeana ATCC 700345
  CDS (1)..(381): transl_table=11
atgaatcaattagccgcgtctgtcagcgtcgatgtacaaacagcctatattgaaacccaatcctcgccagacgaagataagtacctgtttagttacaccataactatctctaacctcagtaatgaagcgatcaccctaaagagtcgtcactggtgtatcactgacgctgatggccgaaaaagcgaagtccatggcacaggggtcgtgggtgaaactccaacgattaaaccaaatagcagttacgaatataccagtggcacagtgcttgagacaccacttggtgtgatggaaggcagttacaccatggtagatagtgacggtaacgaatttgaagcacctatctccgcctttcgcttatctatcccaggcttgcttcattaa

SEQ ID NO: 4943 - protein, 126 aa, Shewanella pealeana ATCC 700345
MNQLAASVSVDVQTAYIETQSSPDEDKYLFSYTITISNLSNEAITLKSRHWCITDADGRKSEVHGTGVVGETPTIKPNSSYEYTSGTVLETPLGVMEGSYTMVDSDGNEFEAPISAFRLSIPGLLH

SEQ ID NO: 4944 - DNA, 393 bp, Azorhizobium caulinodans ORS 571
  CDS (1)..(393): transl_table=11
atgtaccgcgccacgacgcgcaagatccaggtgacagccacgccccgctatgtggcggaacggtcggagccggatcagggccgccatttctgggcctatacgatcgaggtggtgaacctcggcaaggtcagcgtgcagctcaagtcccggcattgggtcatcaccgatgcccacggccatgtggaagaggtgcatggcgcgggcgtcgtgggcgaagagccggtgctgccgccgggcgggcgcttcgaatatacaagcggcgtgcccctctcgacccccaccggcatcatgtcgggccattacgacatgctcgccgagacgggcgagaccttctcggtggaggtgccggccttctcgctggacgtgccccacatggcccgcatcctgaactga

SEQ ID NO: 4945 - protein, 130 aa, Azorhizobium caulinodans ORS 571
MYRATTRKIQVTATPRYVAERSEPDQGRHFWAYTIEVVNLGKVSVQLKSRHWVITDAHGHVEEVHGAGVVGEEPVLPPGGRFEYTSGVPLSTPTGIMSGHYDMLAETGETFSVEVPAFSLDVPHMARILN

SEQ ID NO: 4946 - DNA, 381 bp, Shewanella baltica OS195
  CDS (1)..(381): transl_table=11
atgagcgcattggacacctccattcgggttgaagttaaaactgaatatatagagcagcagtcctcgcccgaggatgaaaaatacctcttcagctataccatcactatcatcaatttaggtgagcaggcggctaaactcgaaacccgtcactggataatcacagatgccaatggcaataccagtgaagtccaaggcgccggagttgtcggtgaaacaccaaccatagcgccaaataccgcctatcaatacaccagtggcacagtgctcgataccccccttggcataatgcatggcacttatggtatggtcagcgaatcgggtgagcatttccaagcgacgatccgtcccttccgtttaacgaccccaggcttactacattaa

SEQ ID NO: 4947 - protein, 126 aa, Shewanella baltica OS195
MSALDTSIRVEVKTEYIEQQSSPEDEKYLFSYTITIINLGEQAAKLETRHWIITDANGNTSEVQGAGVVGETPTIAPNTAYQYTSGTVLDTPLGIMHGTYGMVSESGEHFQATIRPFRLTTPGLLH

SEQ ID NO: 4948 - DNA, 390 bp, Sorangium cellulosum 'So ce 56'
  CDS (1)..(390): transl_table=11
atggttgtgtcgacggccatcacgcagggcatccgggtcaccgtctcgacggtctacgtccccacgcagtcatccccgacggagcaccgctacgtctttgcttacaccgtgcggatcgcgaacgaaggcaccgagcctgcccagctgaggacgcggcactggatcatcacgcatggcagcgggaaggtggaggaggtgcgcggccctggcgtcgtcggccagcagccctcgctcaagcctggcgagcacttcgagtacacgagcggctgtgtgctcgagaccccgcgcggcacgatgcgcggcacctaccagatgcaccgccctgacggccgcgtcttcgacgccgagatcgcgtcgttcaccctggcgatgccgcactccctgaactga

SEQ ID NO: 4949 - protein, 129 aa, Sorangium cellulosum 'So ce 56'
MVVSTAITQGIRVTVSTVYVPTQSSPTEHRYVFAYTVRIANEGTEPAQLRTRHWIITHGSGKVEEVRGPGVVGQQPSLKPGEHFEYTSGCVLETPRGTMRGTYQMHRPDGRVFDAEIASFTLAMPHSLN

SEQ ID NO: 4950 - DNA, 381 bp, Pseudomonas putida GB-1
  CDS (1)..(381): transl_table=11
atgtccgacccccgctatcaaatcgacgtcagcgtcgtgacccgctacctgaaagaacaatccgaccccgaaaacagtcgtttcgctttcgcctacaccattaccgtgcagaacaacggctcgctcaaagccaagctgctgtcacgccactggctgatcaccaacggtgacggcgaagtcgaggaagtgcgcggtgccggcgtggtcggccaacagcccaacatcgacccgggccagagccacacctacagcagcggcgccgtcatcagtacccgcgtgggcaccatgcagggcagctaccagatgtttgccgaagacggtaaacgcttcgacgccgagatcgccccgttccgcctggcggtaccgggggcgctgcactga

SEQ ID NO: 4951 - protein, 126 aa, Pseudomonas putida GB-1
MSDPRYQIDVSVVTRYLKEQSDPENSRFAFAYTITVQNNGSLKAKLLSRHWLITNGDGEVEEVRGAGVVGQQPNIDPGQSHTYSSGAVISTRVGTMQGSYQMFAEDGKRFDAEIAPFRLAVPGALH

SEQ ID NO: 4952 - DNA, 381 bp, Shewanella halifaxensis HAW-EB4
  CDS (1)..(381): transl_table=11
atgagtcaattaacatcgtctgttagagtcgacgtaaaaacagagtatattgaaacccaatcctctccagatgaagataaatatctatttagttacacgattaccatccataatctcggttctgatgatgtgacactaaaacgtcgccattggtgtattaccgactcaaatgggcgaaaaagtgaagttcacggcacgggcgtagtaggcgaaaccccgacaatcaaacccaatagctcatataaatataccagtggcactgtattagaaaccccactcggggtgatggaaggcagctataccatggtcgacagcaatggcgatgagtttaaagccccaatatccgcctttcgtttatcaattcctggtttacttcattaa

SEQ ID NO: 4953 - protein, 126 aa, Shewanella halifaxensis HAW-EB4
MSQLTSSVRVDVKTEYIETQSSPDEDKYLFSYTITIHNLGSDDVTLKRRHWCITDSNGRKSEVHGTGVVGETPTIKPNSSYKYTSGTVLETPLGVMEGSYTMVDSNGDEFKAPISAFRLSIPGLLH

SEQ ID NO: 4954 - DNA, 465 bp, Caulobacter sp. K31
  CDS (1)..(465): transl_table=11
gtgcgctcgatcaggcgtgagtcctcgcctccgctgaagcggatccgtcgccgacgcggcgccgacaccggcatctacgaagcgcggacccgcgacgtcgtggtgcgcgtatcgcccgtgtaccaacccgaggaatccgcgcccgaggagggcctgtggatgtgggcctacacggtcgagatcgagaaccacggggtcgagatggtgcaactggtcgcccggtcctggacgatcaccgacggtctcaaccgcagcagcgaggtcgagggctccggcgtggtcggcgagcagcccgaactgcggccgcgcgaggcgttccgctatgtcagcaactgccccctgccgacgccgtcgggcgccatggtgggccatttccagatgatgaccgaggccggcgaggtgttcgaggcggcgatccccgaattctcgctgcacctgccgggcgcggcgcggcgggtgaactaa

SEQ ID NO: 4955 - protein, 154 aa, Caulobacter sp. K31
MRSIRRESSPPLKRIRRRRGADTGIYEARTRDVVVRVSPVYQPEESAPEEGLWMWAYTVEIENHGVEMVQLVARSWTITDGLNRSSEVEGSGVVGEQPELRPREAFRYVSNCPLPTPSGAMVGHFQMMTEAGEVFEAAIPEFSLHLPGAARRVN

SEQ ID NO: 4956 - DNA, 381 bp, Pseudomonas putida W619
  CDS (1)..(381): transl_table=11
atgtccgatccccgttaccagatcgacgtcagcgtcgtgacccgctatctgaaagaccaatccgaccccgaaagcgatcgctttgcattcgcatacaccataaccgtgcagaacaatggctcgatcaaagccaagctgatgtctcgacactggctgatcaccaacggtgatggcgaagtggaggaggtacgcggcgcaggtgtgatcggccaacaaccgaccatcgagccgggtcagagccacacctacagcagcggtgcagtgatcagcacccgcgtgggcaccatgcagggcagctaccagatgttcgccgaggacggcaaacgcttcgaggccgacattgcacccttccgcctggcggtgccgggggccctgcactga

SEQ ID NO: 4957 - protein, 126 aa, Pseudomonas putida W619
MSDPRYQIDVSVVTRYLKDQSDPESDRFAFAYTITVQNNGSIKAKLMSRHWLITNGDGEVEEVRGAGVIGQQPTIEPGQSHTYSSGAVISTRVGTMQGSYQMFAEDGKRFEADIAPFRLAVPGALH

SEQ ID NO: 4958 - DNA, 381 bp, Shewanella woodyi ATCC 51908
  CDS (1)..(381): transl_table=11
atgactgagcttgaaacatcaattaaaattgacgtgaaaacagagtatatcgaagatcagtcctcccccaatgatgaaaggtacctttttcgatacacaatcaccattatcaatttagggaaagagcccgtcacgctcaaaactcgttactggtcgatcacagattcaaatcaacaccttagtgtcgttcaaggcgcaggcgtagtcggcgaaaccccgaccattgaacctgacactgcctaccaatataccagcggaacagttttagagactccatttggtgttatggaaggcaactatggcatggtcacagaaaatggagagatgtttaaagctaagatcccaccttttcgattatcaattcccgggttacttcactaa

SEQ ID NO: 4959 - protein, 126 aa, Shewanella woodyi ATCC 51908
MTELETSIKIDVKTEYIEDQSSPNDERYLFRYTITIINLGKEPVTLKTRYWSITDSNQHLSVVQGAGVVGETPTIEPDTAYQYTSGTVLETPFGVMEGNYGMVTENGEMFKAKIPPFRLSIPGLLH

SEQ ID NO: 4960 - DNA, 393 bp, Methylobacterium sp. 4-46
  CDS (1)..(393): transl_table=11
atgtacaaggccgagacccgcggcatcagcgtgaccgtcacgccccgtttcgtggaggaggaatcctcgccggacgagagccgctacttcttcgcctacacggtcgagatcaccaataacgggcgtgacaaggtgcagttgcgctcgcggcactggcgcatcgtcgacgggcggggcgccctccaggaggtgcgcggggccggggtcgtcggcaagcagccggtgctcgggccgggtgaatcgttcagctacacgagcggctgcccgctgccgacgccgaacggcaccatggagggcacctacacgatggcgacggcggacggcgagagcttcgaggcagcgatcccggccttctccctcgacgtgccgcacgtgcgccgggtcatgcactga

SEQ ID NO: 4961 - protein, 130 aa, Methylobacterium sp. 4-46
MYKAETRGISVTVTPRFVEEESSPDESRYFFAYTVEITNNGRDKVQLRSRHWRIVDGRGALQEVRGAGVVGKQPVLGPGESFSYTSGCPLPTPNGTMEGTYTMATADGESFEAAIPAFSLDVPHVRRVMH

SEQ ID NO: 4962 - DNA, 393 bp, Polynucleobacter necessarius subsp. necessarius STIR1
  CDS (1)..(393): transl_table=11
atggagcagaattcgaccatgaatccccacgaaatgagcataacggtcaaagcccagtatcttccggaccaatctgaccccgataaccgccaatttgcctttgcttacaccgtaactatccgaaatacgggtgctgccagcattcaacttattgcacgccactggtttattactgacggcgataacgacgtccaggaggtgcgagggttaggggtggtggggcagcagccacttttgcgctccggagaacattttgagtacaccagttgggctactttacccacccctgcggggaccatgcggggagagtatttttgcgtaaccgaggatgcccagttctttcaggctccaatccctgagtttgccttggtaatgccgcgcactcttcattaa

SEQ ID NO: 4963 - protein, 130 aa, Polynucleobacter necessarius subsp. necessarius STIR1
MEQNSTMNPHEMSITVKAQYLPDQSDPDNRQFAFAYTVTIRNTGAASIQLIARHWFITDGDNDVQEVRGLGVVGQQPLLRSGEHFEYTSWATLPTPAGTMRGEYFCVTEDAQFFQAPIPEFALVMPRTLH

SEQ ID NO: 4964 - DNA, 393 bp, Beijerinckia indica subsp. indica ATCC 9039
  CDS (1)..(393): transl_table=11
atgtacagcaccattacccgcgatattcagatcaccgtcctgacggaattcgtgccggaacgttccgatgcggatgagtcctccttcttctgggcctatacggtcgagatcgccaatcagagcgatttgacggtgcaactcaccggacgccattggaagatcaccgacgctaatggcaaacttgaggaagtccagggccctggcattgtcggcgagcagccggttttgaaaccgggagagaccttccgctatacatcgggctgcccactgaccacgccctccggcatcatgactggcagctatcgcatggtgacggaaaagggggatgtttttgaagcagcaatccccgtcttttcgctcgattccccattctctcgacaagtcctaaactga

SEQ ID NO: 4965 - protein, 130 aa, Beijerinckia indica subsp. indica ATCC 9039
MYSTITRDIQITVLTEFVPERSDADESSFFWAYTVEIANQSDLTVQLTGRHWKITDANGKLEEVQGPGIVGEQPVLKPGETFRYTSGCPLTTPSGIMTGSYRMVTEKGDVFEAAIPVFSLDSPFSRQVLN

SEQ ID NO: 4966 - DNA, 375 bp, Burkholderia phymatum STM815
  CDS (1)..(375): transl_table=11
atgagtcagtacgaattcagcgtgtcttcccaggtccggtatatcgccgaagagtcggacccggagcatcggaaatacgctttcgcatacacgctcaccatccgcaatacgggccaggtgaccgcgcagctgatcgcgcgtcactggctgattacggatagcgaaaatcgcgttcaggaagtgaaagggttgggcgtggtcgggcatcagccgttgctgaagccgggcgagcagttcgagtacacgagctacgccgtgatcgcgacgcctgtcggaacaatgcgcggcgagtatttctgcgtggccgaggatggcgagcgctgggatgcgcccgtgccggaattcgttctgcgcatgccgcgcacgctgcattga

SEQ ID NO: 4967 - protein, 124 aa, Burkholderia phymatum STM815
MSQYEFSVSSQVRYIAEESDPEHRKYAFAYTLTIRNTGQVTAQLIARHWLITDSENRVQEVKGLGVVGHQPLLKPGEQFEYTSYAVIATPVGTMRGEYFCVAEDGERWDAPVPEFVLRMPRTLH

SEQ ID NO: 4968 - DNA, 378 bp, Erwinia tasmaniensis Et1/99
  CDS (1)..(378): transl_table=11
atgaacgatacgccccgagtctgtgttcaggtacaaagcgcctatattgagtcgcagtccgcgcctgaagaagaacgctatgtctttgcttacgcggtgaccattcgtaacgtggggcgtattgctgttcaactgatcggccgctattggctaatcaccaacggtaatggccgtgaaactgaagttcagggagagggtgtggtcggagagcagccgcatatcgaacccggcggcgagtaccagtacaccagcggtgccgtgttggaaaccccaatcggcaccatgcagggacactatcagatgatcgatgctgatagcgaaaacttccgtgttgaaattcctgtcttccgtctggcgattgccacccacatccactaa

SEQ ID NO: 4969 - protein, 125 aa, Erwinia tasmaniensis Et1/99
MNDTPRVCVQVQSAYIESQSAPEEERYVFAYAVTIRNVGRIAVQLIGRYWLITNGNGRETEVQGEGVVGEQPHIEPGGEYQYTSGAVLETPIGTMQGHYQMIDADSENFRVEIPVFRLAIATHIH

SEQ ID NO: 4970 - DNA, 426 bp, Orientia tsutsugamushi str. Ikeda
  CDS (1)..(426): transl_table=11
atgaatatagagaatcatcaatttaatggatttcatgctttaacagctgatatattggtaactgtaaggccagctttttatcctgaagcatctaatagattacgttctatatatgtatggctatataatgtccgaatcaaaaatttaagacagaatcctgtacaattattaagtagatattggcaaatatatgattctagtagtacagttgaagaaacagaaggagaaggagtagtaggacagcaacctgtcttaaattctatggaagtttttgaatatgtaagccaaacaaggttatttactaattctggtcttatgaaaggaaaatacactatgctggataagtcatctttggaaaaattcaaagttacaataccaactttttcatttgatgttgacctattaaatcccaagtttaaaaactaa

SEQ ID NO: 4971 - protein, 141 aa, Orientia tsutsugamushi str. Ikeda
MNIENHQFNGFHALTADILVTVRPAFYPEASNRLRSIYVWLYNVRIKNLRQNPVQLLSRYWQIYDSSSTVEETEGEGVVGQQPVLNSMEVFEYVSQTRLFTNSGLMKGKYTMLDKSSLEKFKVTIPTFSFDVDLLNPKFKN

SEQ ID NO: 4972 - DNA, 384 bp, Stenotrophomonas maltophilia K279a
  CDS (1)..(384): transl_table=11
atggaagacgctgacgtttacgccatctccgtcgaagtcgcaccgcgcttcctcgacgatcaatccgcgccggaagacggacgctatgcgttcgcctacacgatccgcatccacaaccaggggcgtgttgccgcgcgcctggtcgcacgccactggcgcatcaccgatgccaacggccgcgtcgagcatgtcgatggcgacggggtgatcggcgagcagccacgcctgcgtcccggtgaagacttccattacacgtccggcgtcatgctggggaccgatcacgggaccatgcagggccactacgacatggtcgccgacgacggcaccgaattcgccgcgccggtcgcacctttcgtgctggccatcccgcgtaccctgcactga

SEQ ID NO: 4973 - protein, 127 aa, Stenotrophomonas maltophilia K279a
MEDADVYAISVEVAPRFLDDQSAPEDGRYAFAYTIRIHNQGRVAARLVARHWRITDANGRVEHVDGDGVIGEQPRLRPGEDFHYTSGVMLGTDHGTMQGHYDMVADDGTEFAAPVAPFVLAIPRTLH

SEQ ID NO: 4974 - DNA, 375 bp, Cellvibrio japonicus Ueda107
  CDS (1)..(375): transl_table=11
atgaccactaacctgattcatgtcagcgtaaaaaccagctatatcactgcacaatcgcaaccggtcgagcagcgttatgtatattcctacacgatcaccattgccaatcagggcgatgagccggcacaactgatcagccgccactggcgcatcaccgatgccaatgaaaaactgcaggaagtgcgcggtacaggggttgttggtgaacaaccggtgattgcacccggaaaaagttacacctataccagcggtgttatcctggaaacagaaaccggcattatggaggggagttaccagatgcgcagtgaaagcggtattgagtttgatgcgcctattccagcctttgcgctggttccccctcatgctgttcactga

SEQ ID NO: 4975 - protein, 124 aa, Cellvibrio japonicus Ueda107
MTTNLIHVSVKTSYITAQSQPVEQRYVYSYTITIANQGDEPAQLISRHWRITDANEKLQEVRGTGVVGEQPVIAPGKSYTYTSGVILETETGIMEGSYQMRSESGIEFDAPIPAFALVPPHAVH

SEQ ID NO: 4976 - DNA, 375 bp, Cupriavidus taiwanensis
  CDS (1)..(375): transl_table=11
atgagcgagtacgccttctccgtgtcggtacgcacccagtacctgccggaccagtccgaccccgagcgcgggcgccatgccttcgcctacaccatcaccatccacaataccggcgaggtcgccgcacagctgatctcgcggcactggatcatcacggacagcgacaacggcacgcaggaagtcgcgggtcttggggtggtcggccaccagccgctgctcaagccgggcgagcatttcgagtacaccagctgggccacgatctcgaccccggtgggctcgatgaagggcgagtacttctgcgtggccgaggacggccaccgcttcgaggtgccgattcccgagttcgcgctggtgctgccgcgcatgctgcactga

SEQ ID NO: 4977 - protein, 124 aa, Cupriavidus taiwanensis
MSEYAFSVSVRTQYLPDQSDPERGRHAFAYTITIHNTGEVAAQLISRHWIITDSDNGTQEVAGLGVVGHQPLLKPGEHFEYTSWATISTPVGSMKGEYFCVAEDGHRFEVPIPEFALVLPRMLH

SEQ ID NO: 4978 - DNA, 408 bp, Stenotrophomonas maltophilia R551-3
  CDS (1)..(408): transl_table=11
atgcctcctgattacactgccggtatggaagacgctgacgtttatgccatctccgtcgaagtcgccccgcgcttcctcgacgatcaatccgcgccggaagacggccgctatgcgttcgcctatacgatccgcatccacaaccaggggcaggtcgccgcgcgcctgatcgcacgccattggcgcatcaccgatgccaacggccgtgtcgagcacgtcgatggcgatggcgtgatcggcgagcagccacgcctgcgccccggtgaagacttccgttacacctccggtgtcatgctggggaccgatcacgggaccatgcaggggcactacgacatggttgccgacgatggcaccgaattcgctgcggcggtcgcacctttcgtgctggccatcccgcgcaccctgcactga

SEQ ID NO: 4979 - protein, 135 aa, Stenotrophomonas maltophilia R551-3
MPPDYTAGMEDADVYAISVEVAPRFLDDQSAPEDGRYAFAYTIRIHNQGQVAARLIARHWRITDANGRVEHVDGDGVIGEQPRLRPGEDFRYTSGVMLGTDHGTMQGHYDMVADDGTEFAAAVAPFVLAIPRTLH

SEQ ID NO: 4980 - DNA, 378 bp, Proteus mirabilis HI4320
  CDS (1)..(378): transl_table=11
atgtttacttcatccaaagtggcgatacaggtacaaagcgtttacattgagagccaatcttcgccagaagaacagcgctatgtttttgcttataccatcaccatacataacttgaataaacatgctattcgcctcctacgtcgctattggttgatcaccaatgcacaaggaaataccactgaagttcaaggtgaaggggttgttggtgaacaacctctgattgaagctggctcacggtatcgttataccagtggcgcagttcttgaaacgccgatgggcaccatggaaggtcattatgaaatgattgacgcacaaggacgtctgtttcaaattgacatccctgttttccgccttgctatccctacattgataaattaa

SEQ ID NO: 4981 - protein, 125 aa, Proteus mirabilis HI4320
MFTSSKVAIQVQSVYIESQSSPEEQRYVFAYTITIHNLNKHAIRLLRRYWLITNAQGNTTEVQGEGVVGEQPLIEAGSRYRYTSGAVLETPMGTMEGHYEMIDAQGRLFQIDIPVFRLAIPTLIN

SEQ ID NO: 4982 - DNA, 381 bp, Vibrio cholerae AM-19226
  CDS (1)..(381): transl_table=11
atggatgtttcgctgccctgtatcaaaattcaggttcaaactcgctacattgaggaacaatcaaatcctgagtatcagcgctttgtgttcgcctatctcatcaccatcaaaaacctcagctcccagaccgtccaactgatgagtcggcgctggttgatcacggatgccgatggcaaacagaccgtggttgaaggcgatggcgttgtgggagagcaacctcgcatcaaagctaatgatgaatatacctacagcagtggcacagccttagagactcccgtcggtgtgatgcagggtcaatacttgatgatcgatgaacaaggtgagtctttcacggttgagattgaaccatttcgtttagccgttccgcatgtattgaattaa

SEQ ID NO: 4983 - protein, 126 aa, Vibrio cholerae AM-19226
MDVSLPCIKIQVQTRYIEEQSNPEYQRFVFAYLITIKNLSSQTVQLMSRRWLITDADGKQTVVEGDGVVGEQPRIKANDEYTYSSGTALETPVGVMQGQYLMIDEQGESFTVEIEPFRLAVPHVLN

SEQ ID NO: 4984 - DNA, 378 bp, Klebsiella pneumoniae 342
  CDS (1)..(378): transl_table=11
atgattaattcgcctcgtgtttgcgttcaggtgcaaagcgtctatatcgaatcgcagtcttctccggaagaagagcgttacgtcttcgcttataccgtcaccattcgcaatctggggcggagtcaggttcagctgcttggccgctactggctcatcactaacggccacggtcgtgagactgaagttcagggtgaaggggtggtcggcgagcaaccacatattcccgctggcggtgaatatcaatataccagcggcgcggtcatcgaaacgccgctgggaaccatgcagggtcattatgagatgatcgatatcgacggcgcgccgttccgtatcgagatccctgtgttccgtctcgcagttccaacgctcattcattaa

SEQ ID NO: 4985 - protein, 125 aa, Klebsiella pneumoniae 342
MINSPRVCVQVQSVYIESQSSPEEERYVFAYTVTIRNLGRSQVQLLGRYWLITNGHGRETEVQGEGVVGEQPHIPAGGEYQYTSGAVIETPLGTMQGHYEMIDIDGAPFRIEIPVFRLAVPTLIH

SEQ ID NO: 4986 - DNA, 393 bp, Rhodospirillum centenum SW
  CDS (1)..(393): transl_table=11
atgtacagcgaggtcacgcggtcgatccgggtcacggtgcggccggaatatctggcgcagcagtcgcagcccgaggagcggcgcttcgtctgggcctatcatgtgcggatcgagaacgaggggctggagacggtgcagctccgcacccgccactggcaggtgacagacgcacagggccgggtgcaggaggtgcgcggcccgggcgtcgtcggcgagcagccggtgctgcgccccggcgaggccttcgagtacaccagcggcacgccgctgcccacaccctcgggcttcatggtcggcagctacggcatggtcaccgcctcgggcgaggcgttcgaggtgcggatccctgccttctccctggacagtccgcacggccgcagccgcccgaactga

SEQ ID NO: 4987 - protein, 130 aa, Rhodospirillum centenum SW
MYSEVTRSIRVTVRPEYLAQQSQPEERRFVWAYHVRIENEGLETVQLRTRHWQVTDAQGRVQEVRGPGVVGEQPVLRPGEAFEYTSGTPLPTPSGFMVGSYGMVTASGEAFEVRIPAFSLDSPHGRSRPN

SEQ ID NO: 4988 - DNA, 381 bp, Shewanella piezotolerans WP3
  CDS (1)..(381): transl_table=11
atgaaccaacgcttgtccccgataaaagttgaagttaagacagaatatattgaagcgcaatcgacaccagatgaagagaaatatttattcagttataccatcaccataatcaatctaggtgatcaagatgtcactttaaagagtcgctactggtgcattacagatgcaaatggacaacaaagtgaagttgaaggtgcaggcgttgtcggtgaaactccaacgataaaacccaatacagcctatcagtacaccagcggaactgttctagaaactccatttggagtaatggaaggcaactacaccatgattaagagtaacggcgaagagttcaaagcaccaatatcagcatttagccttgctgtaccaggcttacttcattaa

SEQ ID NO: 4989 - protein, 126 aa, Shewanella piezotolerans WP3
MNQRLSPIKVEVKTEYIEAQSTPDEEKYLFSYTITIINLGDQDVTLKSRYWCITDANGQQSEVEGAGVVGETPTIKPNTAYQYTSGTVLETPFGVMEGNYTMIKSNGEEFKAPISAFSLAVPGLLH

SEQ ID NO: 4990 - DNA, 381 bp, Shewanella baltica OS223
  CDS (1)..(381): transl_table=11
atgagcgcattggacacctccattcgggttgaagttaaaactgaatatatagagcagcagtcctcgcccgaggatgaaaaatacctcttcagctataccatcactatcatcaatttaggtgagcaggcggctaaactcgaaacccgtcactggataatcacagatgccaatggcaataccagtgaagtccaaggcgccggagttgtcggtgaaacaccaaccatagcgccaaataccgcctatcaatacaccagtggcacagtgctcgatacaccccttggcataatgcatggcacttatggtatggtcagcgaatcgggtgagcatttccaagcgacgatccgtcccttccgtttagcgacccctggcttactacattaa

SEQ ID NO: 4991 - protein, 126 aa, Shewanella baltica OS223
MSALDTSIRVEVKTEYIEQQSSPEDEKYLFSYTITIINLGEQAAKLETRHWIITDANGNTSEVQGAGVVGETPTIAPNTAYQYTSGTVLDTPLGIMHGTYGMVSESGEHFQATIRPFRLATPGLLH

SEQ ID NO: 4992 - DNA, 381 bp, Vibrio splendidus LGP32
  CDS (1)..(381): transl_table=11
atggatatatctacgccttgtatcaaatgccaagttcattctaaatatattgaagaacaatctgagccatctaagaatcgctacgttttcgcttacatcattaccatcaaaaatctaagtaaaacaacagtacaacttatgtctcgtagctggctgattaccgattccaacggtaaacaactcaccatagaaggtgatggcgtggttggacagcaacctgtgattgaagccaatgacgaatacacatacaccagtggcaccgtcatcgaaacccctgtgggtgttatgcaaggtcactatgtgatgaccgatcataaaggcattgatttcataacagaagtcgacccatttagactggctatccccaatatccttaactag

SEQ ID NO: 4993 - protein, 126 aa, Vibrio splendidus LGP32
MDISTPCIKCQVHSKYIEEQSEPSKNRYVFAYIITIKNLSKTTVQLMSRSWLITDSNGKQLTIEGDGVVGQQPVIEANDEYTYTSGTVIETPVGVMQGHYVMTDHKGIDFITEVDPFRLAIPNILN

SEQ ID NO: 4994 - DNA, 384 bp, Acidithiobacillus ferrooxidans ATCC 23270
  CDS (1)..(384): transl_table=11
atggaagaccagccccccacagaaatccagatcagcgtcgagacccgctatctgccggagcagtccagcccggagcaggagcacttcgccttcgcctatcagatcacgatgcagaataacggcccgcagacggcgcagcttctcagtcgtcactggatcattacggatgcggaaggtcatgttcaagaggtcaaaggacccggcgtggttggagaacagcccacgctgcagcctggacaacgcttccgttacaccagcgggtccgtcctgtccacgcccgtaggcagcatgcacggtaccttcgagtgggtcagcgataccggcgaaagtttcgtggttcccatccccgcctttcgcctggcggcggcgaccgtcttccattga

SEQ ID NO: 4995 - protein, 127 aa, Acidithiobacillus ferrooxidans ATCC 23270
MEDQPPTEIQISVETRYLPEQSSPEQEHFAFAYQITMQNNGPQTAQLLSRHWIITDAEGHVQEVKGPGVVGEQPTLQPGQRFRYTSGSVLSTPVGSMHGTFEWVSDTGESFVVPIPAFRLAAATVFH

SEQ ID NO: 4996 - DNA, 381 bp, Pseudomonas aeruginosa LESB58
  CDS (1)..(381): transl_table=11
atgagcgatacccagcaccaggtcaacgtcagggtcgacacccgctaccttccggaacagtccgccccggagcagaaccgtttcgccttcgcctacacggtgaccatcgagaaccagggcgaggttccggcccaactgctgtcgcgccactggatcatcaccgacggcgacggccgtacccaggaagttcgcggcgccggcgtggtcggcgagcaaccgctgatcgcccccggcgcgcaacacacctacaccagcggcacggtgctggcgacccgggtcggcagcatgcgcggcagctaccagatgctcggcagcgacggaatcgccttcgacgccgcgatcccggtgtttcgcctggccgtaccgggagcgctgcactga

SEQ ID NO: 4997 - protein, 126 aa, Pseudomonas aeruginosa LESB58
MSDTQHQVNVRVDTRYLPEQSAPEQNRFAFAYTVTIENQGEVPAQLLSRHWIITDGDGRTQEVRGAGVVGEQPLIAPGAQHTYTSGTVLATRVGSMRGSYQMLGSDGIAFDAAIPVFRLAVPGALH

SEQ ID NO: 4998 - DNA, 390 bp, Thioalkalivibrio sp. HL-EbGR7
  CDS (1)..(390): transl_table=11
atgaccgcacagcacaaccaggatcaccacatcgaagtggacgtgaagaccacctacatcccggagcagtccgacccggacggctcccgctacgtgttcgcctacaccatcaccatccgcaacgtgggccgcgtgcccgccaagctgctcacccgccactggatcatcaacgactccaacggcaaggtgcaggaagtgcgcggcgagggcgtggtgggcgaacagccctacctgaaacccggcgagggtttccagtacaccagcggcaccatgatcgagacccccgtgggcaccatgcagggcagctaccagatgcgcgccgacgacggcgtggagttcgacgccgagatcccggcgttcatgctctcgattccacgtgtcctccattga

SEQ ID NO: 4999 - protein, 129 aa, Thioalkalivibrio sp. HL-EbGR7
MTAQHNQDHHIEVDVKTTYIPEQSDPDGSRYVFAYTITIRNVGRVPAKLLTRHWIINDSNGKVQEVRGEGVVGEQPYLKPGEGFQYTSGTMIETPVGTMQGSYQMRADDGVEFDAEIPAFMLSIPRVLH

SEQ ID NO: 5000 - DNA, 408 bp, Diaphorobacter sp. TPSY
  CDS (1)..(408): transl_table=11
atgccgaaataccagttccaggtggaggtgcagccgcagtaccttcccgacgagtccgcgcccgacgaaggcgtatacagctttgcctacaccatcacgatcaccaacacgggcgacgtgaccgcgcagctgatttcacgccactggatcatctccgacgccaatggccacaccgagcaggtcaagggcctgggcgtggtgggccagcaaccgctgctcaagcccggtgaggcatttcagtacaccagcggctgccgcctgcgcaccgccagcggcagcatgcacggcagctatttctgcgtggctgaggatggtgagccgttcacctgtccgatcgagctgttcgtgctggaggccttctcgcccggccaaccgggccagcccatggcggcaagggtgctgcattga

SEQ ID NO: 5001 - protein, 135 aa, Diaphorobacter sp. TPSY
MPKYQFQVEVQPQYLPDESAPDEGVYSFAYTITITNTGDVTAQLISRHWIISDANGHTEQVKGLGVVGQQPLLKPGEAFQYTSGCRLRTASGSMHGSYFCVAEDGEPFTCPIELFVLEAFSPGQPGQPMAARVLH

SEQ ID NO: 5002 - DNA, 417 bp, Alcanivorax sp. DG881
  CDS (1)..(417): transl_table=11
atgagcgtcaccgaacaaggcaacagcgataccgccaacggcgactcccgccacgacatccgggtatccgtggaaaccgaattcctgccagaccagagcgacgcagagagcgaacgctgggtctttgcttaccacatcagcatccacaatcagggctccgtcagcgcccgcctgctgacccgtcactgggtcatcaccgatggcgaagagcgcgtacaggaagtccatggcgaaggcgtcatcggcgagcagccccatatcgcccccggccagaccttccgctacaccagcggcgccatactggaaaccgaagtgggcagcatgcgtggcagttaccagatgattggcgaagatggcatccactttgacgcacaaatccccgccttcacccttgcggtaccgcatgcattgcattga

SEQ ID NO: 5003 - protein, 138 aa, Alcanivorax sp. DG881
MSVTEQGNSDTANGDSRHDIRVSVETEFLPDQSDAESERWVFAYHISIHNQGSVSARLLTRHWVITDGEERVQEVHGEGVIGEQPHIAPGQTFRYTSGAILETEVGSMRGSYQMIGEDGIHFDAQIPAFTLAVPHALH

SEQ ID NO: 5004 - DNA, 408 bp, Brevundimonas sp. BAL3
  CDS (1)..(408): transl_table=11
atgcacgatggtcctgcctataccgccgaaaccaacggcatcctgatccgggtccggcccagctatctggcgggccagtcggaccccgacgagggccgctgggtctgggcctatcagatcgagatcgtgaacttgacgggatcgacggtgcagctgatggcgcgccgctggaccatcaccgacggccacggccatgtcgaagaggtgcgcggccccggggtggtgggcgaacagccggtgatcgagccgggcgccagctacgcctacgcctcgggctgtccgctgccgaccgacagcggctcgatggtcggcgcctattatatgacggacgcggacgggcgcagtttcgaggccgagattccggccttttcgctggacacgcccgatgcgcggcgggtgttgaactga

SEQ ID NO: 5005 - protein, 135 aa, Brevundimonas sp. BAL3
MHDGPAYTAETNGILIRVRPSYLAGQSDPDEGRWVWAYQIEIVNLTGSTVQLMARRWTITDGHGHVEEVRGPGVVGEQPVIEPGASYAYASGCPLPTDSGSMVGAYYMTDADGRSFEAEIPAFSLDTPDARRVLN

SEQ ID NO: 5006 - DNA, 360 bp, Salmonella enterica subsp. enterica serovar Paratyphi C strain RKS4594
  CDS (1)..(360): transl_table=11
gtgtgtattcaggtgcaaagcgtctacattgaggcgcaatcctcacctgacgatgaacgttacgtttttgcctataccgtaaccatccgcaatctgggccgggcgccagtgcagctattgggccgctactggctgattaccaatggtcatggccgtgaaaccgaagtccagggcgaaggtgtggttggcgtccagccgcgcattgcgcctggcgaagagtatcagtacaccagcggcgcggtaattgaaacgccgctgggcaccatgcagggtcattacgaaatgatcgatgaaaatggcgacgcctttaccatcgacattcccgtgtttcgactcgccgtccctacactcattcactaa

SEQ ID NO: 5007 - protein, 119 aa, Salmonella enterica subsp. enterica serovar Paratyphi C strain RKS4594
MCIQVQSVYIEAQSSPDDERYVFAYTVTIRNLGRAPVQLLGRYWLITNGHGRETEVQGEGVVGVQPRIAPGEEYQYTSGAVIETPLGTMQGHYEMIDENGDAFTIDIPVFRLAVPTLIH

SEQ ID NO: 5008 - DNA, 372 bp, marine gamma proteobacterium HTCC2148
  CDS (1)..(372): transl_table=11
atggttaccgcctacctgccccgccactccacccctgacgacgggcgctacacatttgcttacaccattaccatcagcaatgccggtgacatgcctgtacagttgctgtctcgacactggttgattactgatgcagacgatgacgtacaggaagtgcgcggtgaaggtgtggtcggcgaacaacccatcattcagcccgggggatcttttcgctacaccagcggtgccaccctcgcgactccggtggggttcatgaaaggtaactatttcatggtggtacgcgagcctatggaagtaccaccggaagagctgcccaactttgaggtacccattcccgcatttaccctgcacaccccaaccgcgttgaattag

SEQ ID NO: 5009 - protein, 123 aa, marine gamma proteobacterium HTCC2148
MVTAYLPRHSTPDDGRYTFAYTITISNAGDMPVQLLSRHWLITDADDDVQEVRGEGVVGEQPIIQPGGSFRYTSGATLATPVGFMKGNYFMVVREPMEVPPEELPNFEVPIPAFTLHTPTALN

SEQ ID NO: 5010 - DNA, 372 bp, gamma proteobacterium HTCC5015
  CDS (1)..(372): transl_table=11
atgagcgaacccattcacattcaagttgaaacggattttattgaggatcaaagcgatgccgacgaagagcgctttgtttttgcctataccattaccatcgaaaatcacggagttttgtcggccaagctgctcaatcgccactgggtgattcgcgatagcaacggtcgcactgaggaggttcgcggcgagggagtgattggtgagcagcccgtgattcagcccggcgagagcttttcttacacctcgggtgctattttgcaaaccgatgtggggactatgagcggctcctatcacatgattgatgaggatggccgccccttcgacgcgtcgattcccgagtttgtcctttccattccgcggacgctgcactag

SEQ ID NO: 5011 - protein, 123 aa, gamma proteobacterium HTCC5015
MSEPIHIQVETDFIEDQSDADEERFVFAYTITIENHGVLSAKLLNRHWVIRDSNGRTEEVRGEGVIGEQPVIQPGESFSYTSGAILQTDVGTMSGSYHMIDEDGRPFDASIPEFVLSIPRTLH

SEQ ID NO: 5012 - DNA, 378 bp, Vibrio parahaemolyticus 16
  CDS (1)..(378): transl_table=11
atggaagcagtcccttgtataaaagtccaagttcacagcaagtacattcctgagcaatctcaaccagatgcgaaccgctacctcttcgcctatatgatcacgattaaaaacctaagcaaccaaacggttcagcttcagagccgacgctggttgattacagatgcgaatggcaagcaactgaccatagaaggcgatggagttgtgggtcaacagccttttattcccagcaatgatgagtatacctacagcagcggtaccgctattgaaacacctgttggcgtcatgcaaggccaatacatgatgttggatgaaaaaggcaatcagttcatcgcggaaattgatccatttcgactcgcgattcctaatattctcaactaa

SEQ ID NO: 5013 - protein, 125 aa, Vibrio parahaemolyticus 16
MEAVPCIKVQVHSKYIPEQSQPDANRYLFAYMITIKNLSNQTVQLQSRRWLITDANGKQLTIEGDGVVGQQPFIPSNDEYTYSSGTAIETPVGVMQGQYMMLDEKGNQFIAEIDPFRLAIPNILN

SEQ ID NO: 5014 - DNA, 381 bp, Azotobacter vinelandii DJ
  CDS (1)..(381): transl_table=11
atgtcagatccccgctatcagatcgacgtcagcgtcgagacccgttacctgccggagcagtcgcagccggagcagaaccgctatgtcttcgcctacagcgtgaccatccgcaacaacggcctgctgccggcccaactgctgtcgcgccactggctgatcaccgacggcgacggccatgtccaggaggttcgcggccccggcgtgatcggcacgcagccgctgctcggcccggggcagagccacaactacgacagcagcacgctgctcgccacccaggtcggcaccatgcagggcagctaccagatggtcgccgaggacgggcacgctttcgacgccccgatccgtccgttccgcctggccgtgcccggggccctgcactga

SEQ ID NO: 5015 - protein, 126 aa, Azotobacter vinelandii DJ
MSDPRYQIDVSVETRYLPEQSQPEQNRYVFAYSVTIRNNGLLPAQLLSRHWLITDGDGHVQEVRGPGVIGTQPLLGPGQSHNYDSSTLLATQVGTMQGSYQMVAEDGHAFDAPIRPFRLAVPGALH

SEQ ID NO: 5016 - DNA, 378 bp, Citrobacter sp. 30_2
  CDS (1)..(378): transl_table=11
atgatcaattcgccccgagtgtgcattcaggtacaaagcgtctacattgaggcgcaatcctcacctgatgatgaacgttacgtttttgcttataccgtgactatccgcaatttggggcgagcgcctgtgcagctgttggggcgttattggttaatcactaatggtcatggccgtgaaaccgaagttcagggcgaaggcgtggttggcgttcagccccacatcgagcctggcgaagagtatcagtacaccagcggcgcggtgattgaaacgccgctgggcaccatgcagggtcattacgaaatgatcgatgaacaagggatcgcctttaccatcgacattcccgtgttccgactcgccgttccaacactcattcactaa

SEQ ID NO: 5017 - protein, 125 aa, Citrobacter sp. 30_2
MINSPRVCIQVQSVYIEAQSSPDDERYVFAYTVTIRNLGRAPVQLLGRYWLITNGHGRETEVQGEGVVGVQPHIEPGEEYQYTSGAVIETPLGTMQGHYEMIDEQGIAFTIDIPVFRLAVPTLIH

SEQ ID NO: 5018 - DNA, 381 bp, Pseudomonas fluorescens SBW25
  CDS (1)..(381): transl_table=11
atgtccgatcctcgctaccagatcgacgtcagcgtcgtcacccgcttcctcgcggaccaatcgcaacctgaacagaaccgcttcgcctttgcctacaccatcacggtgaaaaacaacgggctggtgccggccaagttgctgtcacgccactgggtcatcaccgacggtgacggccaggtagaagaagtgcgcggcgcgggcgtggtaggccagcagccgctgatcgacataggcgccagccacacctacagcagcggcacggtgatgacctccaaggtcggcaccatgcagggttcgtatcagatgaaagccactgacggtaaattgttcgacgccatcattgcgcccttccgcctcgcggtgccgggagccctgcactga

SEQ ID NO: 5019 - protein, 126 aa, Pseudomonas fluorescens SBW25
MSDPRYQIDVSVVTRFLADQSQPEQNRFAFAYTITVKNNGLVPAKLLSRHWVITDGDGQVEEVRGAGVVGQQPLIDIGASHTYSSGTVMTSKVGTMQGSYQMKATDGKLFDAIIAPFRLAVPGALH

SEQ ID NO: 5020 - DNA, 384 bp, Thauera sp. MZ1T
  CDS (1)..(384): transl_table=11
atgagcgagaccacgccttaccgcgtccaggtgaccgcggtcgccgaatacgtcgccgaccagtcgcgcccgcaggacgagcacttcgtgttcgcctaccacatcaccgtcctcaacaccggcgaggtgcgcgcccagctgctcgcgcgccactgggtgatcaccgacggcaacggcaagatgcaggaagtccacggccagggcgtggtcggcgagcagccggtgctcggccccggccaggccttccgctacaccagcggctgcgtgctcgccacgccggtggggacgatgcagggcagctaccgcatgcgcgcggacgacggccacgagttcgaggccgagattccggccttcatgctggcggtgccgaaagcgctgcactga

SEQ ID NO: 5021 - protein, 127 aa, Thauera sp. MZ1T
MSETTPYRVQVTAVAEYVADQSRPQDEHFVFAYHITVLNTGEVRAQLLARHWVITDGNGKMQEVHGQGVVGEQPVLGPGQAFRYTSGCVLATPVGTMQGSYRMRADDGHEFEAEIPAFMLAVPKALH

SEQ ID NO: 5022 - DNA, 378 bp, Pectobacterium atrosepticum SCRI1043
  CDS (1)..(378): transl_table=11
atgattaatgcgccccgtgtttgtgtacaaattcagagcttctatgtggaatcacaatcagagcctgatgaagaacgtttcgtgtttgcttacacggttacggttcgcaatctggggcgtcatgaagtccagcttttggggcgttattggctgatcaccaacggtaatggccgtcagactgaagttcagggtgaaggcgtagtcggtgaacagccgattatcgagcctggcggcgagttccaatataccagcggtgcagtcatggaaacgcccctcggcacaatggaaggccactaccatatggttgaccatcagagtaaagcgtttcaggtcccaatccccgtcttccgactggcaatcccctcactgatacattaa

SEQ ID NO: 5023 - protein, 125 aa, Pectobacterium atrosepticum SCRI1043
MINAPRVCVQIQSFYVESQSEPDEERFVFAYTVTVRNLGRHEVQLLGRYWLITNGNGRQTEVQGEGVVGEQPIIEPGGEFQYTSGAVMETPLGTMEGHYHMVDHQSKAFQVPIPVFRLAIPSLIH

SEQ ID NO: 5024 - DNA, 378 bp, Yersinia pseudotuberculosis IP 32953
  CDS (1)..(378): transl_table=11
atgattgaacagccccgtatttgtgtgcaggtacaaagtatctatgtggaaacgcaatcgatacccgaagaggagcgtttcgtcttcgcctataccgttactgttcgtaatttagggcgttcaaacgtgcaactgcttggccgctattggttaattaccaatagcaatggccgccagactgaagttcagggagaaggggttatcggcgaacaaccacttatcctgccaggtaatgaatttcaatacaccagcggtgccgttctggaaaccccgctgggtactatggaaggacattatgaaatgattgatcaccttggacaggccttccgtactgtaattccggtattccgcttagcgatcccagccctgatccattaa

SEQ ID NO: 5025 - protein, 125 aa, Yersinia pseudotuberculosis IP 32953
MIEQPRICVQVQSIYVETQSIPEEERFVFAYTVTVRNLGRSNVQLLGRYWLITNSNGRQTEVQGEGVIGEQPLILPGNEFQYTSGAVLETPLGTMEGHYEMIDHLGQAFRTVIPVFRLAIPALIH

SEQ ID NO: 5026 - DNA, 381 bp, Methylococcus capsulatus str. Bath
  CDS (1)..(381): transl_table=11
atgcgacgtaaaccctatgaactgaaagtcgaagtcaaggccgtctatctgcgggagcactcccggcccgatgctcatcagtacaccttcgcctacaccgtgaccatggagaacaccggcaccgttcccgccaagctcctgggccggcgctggatcatcaccgatgccaacggcaagacggtggaggtggtcggggagggcgtcgtcggcgagcatccgtatctccggcccggcgaggctttcgagtacaccagcgccgcgaccatcgccaccccggtcggcagtatgcacggcagctatcagctgatcgccgacgacgggatgccattcgaggcgcccatcgccgcgttcagcctcgcaatcccgcgccggctgcactga

SEQ ID NO: 5027 - protein, 126 aa, Methylococcus capsulatus str. Bath
MRRKPYELKVEVKAVYLREHSRPDAHQYTFAYTVTMENTGTVPAKLLGRRWIITDANGKTVEVVGEGVVGEHPYLRPGEAFEYTSAATIATPVGSMHGSYQLIADDGMPFEAPIAAFSLAIPRRLH

SEQ ID NO: 5028 - DNA, 384 bp, Photobacterium profundum SS9
  CDS (1)..(384): transl_table=11
ttgagcgcgaattcccccccaacaattaaatgcaacgtcgttactcattatattgaggaacagtctgaacctaacaatcaacgttatgttttctcatacaccattacgattagaaacctagggaaaggttcggccaaattactaagtcgttattggctaataaccgatgcaaatgggaaacggctcgtgattgaaggtgaaggtgtggttggcgaacaaccagaaataaagatgaacgaagaatatacttataccagcggtacgatcattgaaaccccacttggtgtaatgcaaggccactacgtcatgggcactgaagatggtgagacctttaaagcagaagtatctccgtttaggttagcaatacccaatattctccattaa

SEQ ID NO: 5029 - protein, 127 aa, Photobacterium profundum SS9
MSANSPPTIKCNVVTHYIEEQSEPNNQRYVFSYTITIRNLGKGSAKLLSRYWLITDANGKRLVIEGEGVVGEQPEIKMNEEYTYTSGTIIETPLGVMQGHYVMGTEDGETFKAEVSPFRLAIPNILH

SEQ ID NO: 5030 - DNA, 453 bp, Anaplasma marginale str. St. Maries
  CDS (1)..(453): transl_table=11
atggaccgcgcgtttgttttacgaagttgtggggtgtgctgcgctatgacgacgcctagatgtggcggtgcgactggtctgatagaagttgaggtaacaccgagctacctcgaggagcattcgatgccgcacgagaattgctacatatggctttacagcgtcaagatcaaaaatgtcagcaattctacggtacagctgctgaagcgtagctggaaaataatagattccaaaggcatggtgaacgaggtaagcggatctggtgttgtgggccgtcagcctgtgctaaagcccggggggtttttcgagtacactagtggcacatgcctcagtacgccgtccggggttatgaacgggtggtatcaatttgtggatgaagacaaggcgcaggtgttctacgtagatgtgcctaccttttcgctcgatagcccgtacgatattgtgaggcttaactag

SEQ ID NO: 5031 - protein, 150 aa, Anaplasma marginale str. St. Maries
MDRAFVLRSCGVCCAMTTPRCGGATGLIEVEVTPSYLEEHSMPHENCYIWLYSVKIKNVSNSTVQLLKRSWKIIDSKGMVNEVSGSGVVGRQPVLKPGGFFEYTSGTCLSTPSGVMNGWYQFVDEDKAQVFYVDVPTFSLDSPYDIVRLN

SEQ ID NO: 5032 - DNA, 375 bp, Idiomarina loihiensis L2TR
  CDS (1)..(375): transl_table=11
atgacagtcagtaaaattgaaattgatgtaaaaacgcaatatttagcggcgcagtcaaaccctgatgccggacaatatgtattttcttacaccataaccataaccaatgagtccagccagttagtgcagttgcttgcccgcgaatggcgcattaccgacgcagacaataaaattacccgggtagccggtgacggtgtagtcggacaacagcctaaactggctgccggtgaatcattcagttataccagcggtaccgttctggctacgcctataggcactatggaagggcattacctaatgatagatgaacagggctcgcagtttaaagcacctattccttcgttccggctggccatccctaatattattcattaa

SEQ ID NO: 5033 - protein, 124 aa, Idiomarina loihiensis L2TR
MTVSKIEIDVKTQYLAAQSNPDAGQYVFSYTITITNESSQLVQLLAREWRITDADNKITRVAGDGVVGQQPKLAAGESFSYTSGTVLATPIGTMEGHYLMIDEQGSQFKAPIPSFRLAIPNIIH

SEQ ID NO: 5034 - DNA, 384 bp, Aromatoleum aromaticum EbN1
  CDS (1)..(384): transl_table=11
atgagcgaatccgaaaaatatcgcatcgaggtggaagccatcgccgagttcgtaccgggacaatccgacccggacgaaaaccgctacgtttttgcataccacatcacgctgacgaacaccggcgaagtgcccgcccagttgatcagccggcactgggtcatcaccgacggcgcgggcaaggtccaggaagttcgcggcctcggagtgatcggcgaacagccgatgctcgcgccgggacagcagttcagctattcgagcgggtctgtcctcgaaaccccggtcggcacgatgcagggcagctaccagatggcggccgaggacggccaccgtttcgacgccgaaatcccggccttcatgctggcgatgccgcgcgtgctgcactga

SEQ ID NO: 5035 - protein, 127 aa, Aromatoleum aromaticum EbN1
MSESEKYRIEVEAIAEFVPGQSDPDENRYVFAYHITLTNTGEVPAQLISRHWVITDGAGKVQEVRGLGVIGEQPMLAPGQQFSYSSGSVLETPVGTMQGSYQMAAEDGHRFDAEIPAFMLAMPRVLH

SEQ ID NO: 5036 - DNA, 405 bp, Ehrlichia ruminantium str. Welgevonden
  CDS (1)..(405): transl_table=11
atgacattgcaatattacagtatgacaaagctgattgaagtgaaggttgttccaagttacttagaagagcagtcttctcctcatgagaactgttatatatggttgtataatattagagtaaaaaataagagtacatctactgttcagttattaaggagaagttggaaaattattgattctactggcattattaatgaagtaacaggacttggtgttataggaaaacagccagttttaaaacctggtgagttttttgagtatactagtggtgcatacttaagtactccatctggtatgatgcatggagaatatcagtttatggatgaagatgctgcacaggttttctatgtaaatatacctatgttttctcttgatagtccatatgttaatacaaaaccacattaa

SEQ ID NO: 5037 - protein, 134 aa, Ehrlichia ruminantium str. Welgevonden
MTLQYYSMTKLIEVKVVPSYLEEQSSPHENCYIWLYNIRVKNKSTSTVQLLRRSWKIIDSTGIINEVTGLGVIGKQPVLKPGEFFEYTSGAYLSTPSGMMHGEYQFMDEDAAQVFYVNIPMFSLDSPYVNTKPH

SEQ ID NO: 5038 - DNA, 474 bp, Gluconobacter oxydans 621H
  CDS (1)..(474): transl_table=11
atgcctgacaagtcatcccacccccatctgcacgccgatcccgagacggcactcgccgaagccatggaaagcgccccccgcttcagcgaaaccacggacgacgtgacggtcacggtccggaccttctggctggacgaccagtcccaccccgaagaccatcaatacgcctgggcctatcacatcagcatcgagaacgagcggaaagacacgttccagcttctctcccgctcttgggaaatcgtggacgggcttggacgcaaggaacatgtccacggcgatggtgtcgttggtgaacagcccgtgatcgcgcctaacgaacagttcgactacacgtccggcgccatgctcacgacgccgaccggcttcatgcgcggcacctaccacatggtcgagccccgctcgggccatcgcttcgacgtcagcatccccgttttcagcctcgacagcccccacgacagcacactggtgcactga

SEQ ID NO: 5039 - protein, 157 aa, Gluconobacter oxydans 621H
MPDKSSHPHLHADPETALAEAMESAPRFSETTDDVTVTVRTFWLDDQSHPEDHQYAWAYHISIENERKDTFQLLSRSWEIVDGLGRKEHVHGDGVVGEQPVIAPNEQFDYTSGAMLTTPTGFMRGTYHMVEPRSGHRFDVSIPVFSLDSPHDSTLVH

SEQ ID NO: 5040 - DNA, 405 bp, Wolbachia endosymbiont strain TRS of Brugia malayi
  CDS (1)..(405): transl_table=11
atgactttagaatatacacttactactaactctgttgaagttacagttttgccagtctatattgaggagcaatctattccttatgaaaattgctatgtatggatgtacaatgtcaagataaaaaataaaagcctatcaactattcaattgctgagccgccattggcaaataatagactacaaaggaaagataaatgaaattgttggggctggtgttattggagagcagcctgtgataaaacctggagaggtatttaaatacacaagcggaacatacttgaatgcaccgtcaggaataatgcaaggtaagtacgaatttctaaatgaagaaaacacaaaagttttcgaggtcacaataccgtctttttctttagatagcccatacacaaacattaggccacattaa

SEQ ID NO: 5041 - protein, 134 aa, Wolbachia endosymbiont strain TRS of Brugia malayi
MTLEYTLTTNSVEVTVLPVYIEEQSIPYENCYVWMYNVKIKNKSLSTIQLLSRHWQIIDYKGKINEIVGAGVIGEQPVIKPGEVFKYTSGTYLNAPSGIMQGKYEFLNEENTKVFEVTIPSFSLDSPYTNIRPH

SEQ ID NO: 5042 - DNA, 402 bp, Pseudomonas syringae pv. syringae B728a
  CDS (1)..(402): transl_table=11
atggatttcaaggcctattgcatgcccgattctcgttacaaggtcgacgtcagcgtcgtcacacgcttcctctcggaacaatcacaacccgagcagaaccgcttcgctttcgcctacaccatcaccgtgcacaacaacggcgagttacctgcccgactgctgtcgcggcactgggtcatcaccgacggtgatggcaatgtcgaggaagtgcgtggcgaaggcgtggttggccagcagccactgatcaagaacggccacagccatacctacagcagtggtacggtcatgaccaccaaggtcggcaacatgcagggcacctatcagatgctggccgaagacggcaaacgcttcgatgccgtcatcgagccattccggctggccgttccgggctcgctgcactga

SEQ ID NO: 5043 - protein, 133 aa, Pseudomonas syringae pv. syringae B728a
MDFKAYCMPDSRYKVDVSVVTRFLSEQSQPEQNRFAFAYTITVHNNGELPARLLSRHWVITDGDGNVEEVRGEGVVGQQPLIKNGHSHTYSSGTVMTTKVGNMQGTYQMLAEDGKRFDAVIEPFRLAVPGSLH

SEQ ID NO: 5044 - DNA, 381 bp, Pseudomonas fluorescens Pf-5
  CDS (1)..(381): transl_table=11
atgtccgatcctcgttaccaggtcgacgtcagcgtcgtcactcgctttctggcagaccaatcgcaacccgagcagaaccgcttcgctttcgcctacaccatcaccgtgcagaacaatggctcgcttccagccaagctgctgtcccggcactgggtgatcaccgatggcgacgggcatgtcgaagaggtccgtggtgccggcgtggtgggccagcaaccgctgatcgccgcaggcaaaagccacacctacagcagcggcacggtaatgaccacccgggttggcaacatgcagggcagctatcagatgctcgccgaggatggcaaacagttcgacgccgtcattgcgcccttccgcctggccgtgcccggagccttgcactga

SEQ ID NO: 5045 - protein, 126 aa, Pseudomonas fluorescens Pf-5
MSDPRYQVDVSVVTRFLADQSQPEQNRFAFAYTITVQNNGSLPAKLLSRHWVITDGDGHVEEVRGAGVVGQQPLIAAGKSHTYSSGTVMTTRVGNMQGSYQMLAEDGKQFDAVIAPFRLAVPGALH

SEQ ID NO: 5046 - DNA, 435 bp, Pseudomonas syringae pv. phaseolicola 1448A
  CDS (1)..(435): transl_table=11
ttgtctacctgccgcacacgcccttttttcgctatggatttcaaggcctattgcatgcccgattctcgttacaaggtcgacgtcagcgtcgtcacacgctttctctcggaacagtctcaacccgagcagaatcgcttcgctttcgcctataccatcaccgtgcacaacaacggtgaattacctgccaaactgctgtcgcgtcactgggtcattaccgacggcgacggccatgtcgaagaggtgcgcggcgagggcgtggtcggtcagcaaccgttgatcgaggtcggtaaaagccatacctacagcagcggtacggtaatgaccacccgcgtgggcaatatgcagggttcttatcagatgctggctgaagacggtaaacgctttgatgcggtcataaagccctttcgtctggccgtcccgggttcgctgcactga

SEQ ID NO: 5047 - protein, 144 aa, Pseudomonas syringae pv. phaseolicola 1448A
MSTCRTRPFFAMDFKAYCMPDSRYKVDVSVVTRFLSEQSQPEQNRFAFAYTITVHNNGELPAKLLSRHWVITDGDGHVEEVRGEGVVGQQPLIEVGKSHTYSSGTVMTTRVGNMQGSYQMLAEDGKRFDAVIKPFRLAVPGSLH

SEQ ID NO: 5048 - DNA, 384 bp, Dechloromonas aromatica RCB
  CDS (1)..(384): transl_table=11
atgtccgacaccaacaagtaccgaatcgaagtgcaacccatgccgcagttcattccggagcaatccgacccggaaaacgaccgctacatctttgcctacaccatcaccatcaagaatatcggcgaagtaccggcccaactggtttcccggcactggatcatcaccgatggcaacaacgaggtacaggaagtgcgcggccttggcgtcgtcggcaagcagccgctgctccagcccggcgaaagttttcagtacaccagtggctcctcgctgacgaccgcaatcggcaccatgaaagggacttaccagatggtggccgaggacggcacccacttcgaagccgaaatcccggagtttgttctggccagtccgcgcgccctgcattga

SEQ ID NO: 5049 - protein, 127 aa, Dechloromonas aromatica RCB
MSDTNKYRIEVQPMPQFIPEQSDPENDRYIFAYTITIKNIGEVPAQLVSRHWIITDGNNEVQEVRGLGVVGKQPLLQPGESFQYTSGSSLTTAIGTMKGTYQMVAEDGTHFEAEIPEFVLASPRALH

SEQ ID NO: 5050 - DNA, 384 bp, Thiobacillus denitrificans ATCC 25259
  CDS (1)..(384): transl_table=11
gtggccgaaggcaagaaataccagataaacatcagcgtcaacacggcttatctggcggagcagagcgacccgtcggccgaccgttacgtgttcgcctacaccatcacgatcgaaaacgtcggcacggtcgccgcgcagctgatctcgcgtcactgggtgatcaccgacgccgacgacgtcgtgcaggaagtcaagggcctcggcgtcgtcggcgagcagccgctgctgcgccccggcgagaccttcgaatacagcagcggggcagcgctcgcgacgccggtcggaaccatgcagggcagctatcagatggtggccgaggacggcaacaagttcgacgccgagattccccgcttcacgctggccatgccgcgcgtgctgcactga

SEQ ID NO: 5051 - protein, 127 aa, Thiobacillus denitrificans ATCC 25259
MAEGKKYQINISVNTAYLAEQSDPSADRYVFAYTITIENVGTVAAQLISRHWVITDADDVVQEVKGLGVVGEQPLLRPGETFEYSSGAALATPVGTMQGSYQMVAEDGNKFDAEIPRFTLAMPRVLH

SEQ ID NO: 5052 - DNA, 390 bp, Pseudoalteromonas haloplanktis TAC125
  CDS (1)..(390): transl_table=11
atgacaacaagcagtaatattggatcgcctgtaaaggtatctgttgaaacattttatgtagaagagcagtcgcaacctgaactagaaaagtttgtatttgcttattctgtaaccattaaaaaccacagtttgtgtagcgctaaattactgagccgttattggttaattaccgatgcaaatggcaaagaaattgaagtgcaaggcgaaggtgtggtcggcgaaaacccagttatagcacccggcgaaagttataaatataccagtggggcaatactagatacccctgtaggtactatgcaagggcattatacgttacgtaacgagtttggcactgagtttaaagcgcctattaacgtgtttcgtttagcctgccctaacatactgcactag

SEQ ID NO: 5053 - protein, 129 aa, Pseudoalteromonas haloplanktis TAC125
MTTSSNIGSPVKVSVETFYVEEQSQPELEKFVFAYSVTIKNHSLCSAKLLSRYWLITDANGKEIEVQGEGVVGENPVIAPGESYKYTSGAILDTPVGTMQGHYTLRNEFGTEFKAPINVFRLACPNILH

SEQ ID NO: 5054 - DNA, 429 bp, Nitrosococcus oceani ATCC 19707
  CDS (1)..(429): transl_table=11
atgagcaattatagaattgttgatgctttagataatatttgttttatggaacaacctaagccttataagataatagtagaagtagcgacaacttttatcgaagaacaatccgatcctgctgtagcccgttatgtctttgcttatactattactattcataatttgggaacgattgccgtcaagctgctaacccggcactgggtcattaccgacggggaaggtcaagttcgggaagttcgggggcaaggggtcataggagagcagccttctctcaaaccaggggaacaattttgctataccagcggagccatgatcgaaacaccggtaggcaccatgcatggttgttatggcatggtaggagaagatggcgtaacctttgatgccgagatcgccgctttcaccctagcgatgccgggctccttacattga

SEQ ID NO: 5055 - protein, 142 aa, Nitrosococcus oceani ATCC 19707
MSNYRIVDALDNICFMEQPKPYKIIVEVATTFIEEQSDPAVARYVFAYTITIHNLGTIAVKLLTRHWVITDGEGQVREVRGQGVIGEQPSLKPGEQFCYTSGAMIETPVGTMHGCYGMVGEDGVTFDAEIAAFTLAMPGSLH

SEQ ID NO: 5056 - DNA, 381 bp, Pseudomonas fluorescens Pf0-1
  CDS (1)..(381): transl_table=11
atgtccgatcctcgctaccaggtcgatgtcagtgtcgttacccactatctggcagaccaatcgcaacccgagcacgagcgctttgccttcgcctacaccatcaccgtgcagaacaatggcgagcaaccggcccgcctgatgtcgcgccactgggtgataaccgatggcgacgggcatgtcgaagaagtgcgcggcgccggcgtggttggccagcaaccgttgatcggcgctggcaaaagccacacctacagcagcggcacggtgatgaccaccaaggtcggcaccatgcaaggcagttacgaaatggtcgccgacgacggcaagcacttcgatgcgatcatcaagcccttccgcctcgccgttcccggagccctgcactga

SEQ ID NO: 5057 - protein, 126 aa, Pseudomonas fluorescens Pf0-1
MSDPRYQVDVSVVTHYLADQSQPEHERFAFAYTITVQNNGEQPARLMSRHWVITDGDGHVEEVRGAGVVGQQPLIGAGKSHTYSSGTVMTTKVGTMQGSYEMVADDGKHFDAIIKPFRLAVPGALH

SEQ ID NO: 5058 - DNA, 384 bp, Xanthomonas campestris pv. vesicatoria str. 85-10
  CDS (1)..(384): transl_table=11
atgcaagatgatccgcgctaccgcgtcgaggtcgaggtatcgccccgcttcctcgcccatcaatccaccccggacgaaggccgctacgcctttgcctacagcatccgcatccagaatgcgggcgcggtgcctgcgcgcctgatcgcgcgtcattggcagatcaccgatggcaacgggcgcaccgagcaggtggatggcgaaggcgtggtcggcgaacagccgtggctgcgaccgggcgaagctttccattacacctccggcgtactgctggagaccgagcagggacagatgcagggccactacgacatggtggccgacgatggcaccgaatttatcgctccgatcgccgccttcgtgctgagcgtgcccaggacgctgcactga

SEQ ID NO: 5059 - protein, 127 aa, Xanthomonas campestris pv. vesicatoria str. 85-10
MQDDPRYRVEVEVSPRFLAHQSTPDEGRYAFAYSIRIQNAGAVPARLIARHWQITDGNGRTEQVDGEGVVGEQPWLRPGEAFHYTSGVLLETEQGQMQGHYDMVADDGTEFIAPIAAFVLSVPRTLH

SEQ ID NO: 5060 - DNA, 393 bp, Brucella melitensis biovar Abortus 2308
  CDS (1)..(393): transl_table=11
atgtatagtgcggtaacacgcgggatcgaagttacggtcgagcccttttatctggaagtccaatccgagccggaagaaaaccgttatgtatggggttatcgcgtcacgatcgtgaacaactcatccgaaacggtgcagctttgctcgcgctactggcagatcaccgacgccaacggccatgtgcaagaagtgcgcggttcaggcgtggtcggcaagcagcctgttctcgatccgggcgattcataccagtattcttccggttgcccgctcacaacctcgtcaggcgtgatggtcgggcgctaccagatgaagggcgaagacggcgcacaattcgagatcgagattcccgccttttcactcgacgtacccgaacagcgccgcacgctgaactga

SEQ ID NO: 5061 - protein, 130 aa, Brucella melitensis biovar Abortus 2308
MYSAVTRGIEVTVEPFYLEVQSEPEENRYVWGYRVTIVNNSSETVQLCSRYWQITDANGHVQEVRGSGVVGKQPVLDPGDSYQYSSGCPLTTSSGVMVGRYQMKGEDGAQFEIEIPAFSLDVPEQRRTLN

SEQ ID NO: 5062 - DNA, 393 bp, Magnetospirillum magneticum AMB-1
  CDS (1)..(393): transl_table=11
atgtacagccagaccacccgagacatcgaggtgaccgtcaagcctttctacctggacgaccagtcctcgcccggcgacaaccacttcgtctgggcttatcgcgtgcggatcgtcaacaagggcagccgcaccgtccagctcctgcgtcgccactgggtcatcaccgatgccatcggccgggtgcaggaggtcaagggccccggcgtggtgggcgaacagcccgttctgcgccccggcgacgcctatgaatatacttcggggaccccgctgccgacgccgtcgggcatcatggtcggcacctacgagatggaggacgaggacggctcggccttcgacatcgccattcccgctttctccctggacagcccgcacgagaagccccggctgaactag

SEQ ID NO: 5063 - protein, 130 aa, Magnetospirillum magneticum AMB-1
MYSQTTRDIEVTVKPFYLDDQSSPGDNHFVWAYRVRIVNKGSRTVQLLRRHWVITDAIGRVQEVKGPGVVGEQPVLRPGDAYEYTSGTPLPTPSGIMVGTYEMEDEDGSAFDIAIPAFSLDSPHEKPRLN

SEQ ID NO: 5064 - DNA, 384 bp, Hahella chejuensis KCTC 2396
  CDS (1)..(384): transl_table=11
atgagtgagacgtctttgtacgatattcgggtaagtgtgcgcacgcagttcattgcgtcacaatcggacccggacaataaccgcttcgtgttcgcctatcacatcaccatcctgaatgagggcgcgcgtgcggcgcagctgttacggcggcgctggctgatcattgacggcgacaacaaggagcaggaagtcaccggcgatggcgtggtgggacaacagccggtcattcaaccaggcgcaagctatgaatattccagcggctgtgtgctggatacggaagttggcgcgatggaaggacattacgagatgctggctgacgatggccatctgttcaacgcggagattccccgctttatactcgctgcgccccgcgtcctgcattag

SEQ ID NO: 5065 - protein, 127 aa, Hahella chejuensis KCTC 2396
MSETSLYDIRVSVRTQFIASQSDPDNNRFVFAYHITILNEGARAAQLLRRRWLIIDGDNKEQEVTGDGVVGQQPVIQPGASYEYSSGCVLDTEVGAMEGHYEMLADDGHLFNAEIPRFILAAPRVLH

SEQ ID NO: 5066 - DNA, 384 bp, Xanthomonas oryzae pv. oryzae MAFF 311018
  CDS (1)..(384): transl_table=11
atgcacgatgatccgcgctatcgggtcgaggtcgaggtatcgccccgcttcctcgcccatcaatccaccccggacgagggccgctatgccttcgcctacagcatccgcatccagaatgcgggcgccgtgcctgcgcggttgatcgcgcgccattggcagatcaccgatggcaacggacgcaccgagcaggtggatggcgaaggcgtggtcggcgagcagccgaggctgcgcccgggcgaggcgttccattacacctccggcgtgctgctggagaccgagcagggacagatgcaaggccactacgacatggtggccgacgacggcaccgaatttatcgccccgatcgccgccttcgtgctgagcgtacccaggacgctgcactga

SEQ ID NO: 5067 - protein, 127 aa, Xanthomonas oryzae pv. oryzae MAFF 311018
MHDDPRYRVEVEVSPRFLAHQSTPDEGRYAFAYSIRIQNAGAVPARLIARHWQITDGNGRTEQVDGEGVVGEQPRLRPGEAFHYTSGVLLETEQGQMQGHYDMVADDGTEFIAPIAAFVLSVPRTLH

SEQ ID NO: 5068 - DNA, 378 bp, Sodalis glossinidius str. 'morsitans'
  CDS (1)..(378): transl_table=11
atgattaactcgccccgtgtctgtgttcaggttcagagcatgtacatcgagacgcagtctcagccggaaagtgatcgttatgtctttgcttataccatcacgctgcgcaatttgggtcggcaccctgtgcagctgataggacgttactggttgatcaccaatgccaacggtcaagagacagaggttcagggcgagggcgtcgtcggtgaaaagccgcgcattctgcccggtggcgagtttcaatacaccagcggcgcggtgctggaaacccctctgggtaccatgcaaggccattacgatatggtcgatgaccaaggacagggatttcacgttgccatccccgtcttccgcctggcgattccttctcttataaactaa

SEQ ID NO: 5069 - protein, 125 aa, Sodalis glossinidius str. 'morsitans'
MINSPRVCVQVQSMYIETQSQPESDRYVFAYTITLRNLGRHPVQLIGRYWLITNANGQETEVQGEGVVGEKPRILPGGEFQYTSGAVLETPLGTMQGHYDMVDDQGQGFHVAIPVFRLAIPSLIN

SEQ ID NO: 5070 - DNA, 402 bp, Erythrobacter litoralis HTCC2594
  CDS (1)..(402): transl_table=11
atgaaagaactcttccagcacgccgccaacaccgacgacgtcatcgtgcgcgtcgcggtcaatttcctgcccgaacagagccagccgagcgcgggcaagtggttctgggtctaccatatccggatcgagaaccattcgaacgagcgcgtgcagctgatgacccgccactggcgcatcaccgacgcgcgcgagatggtgaaccatgtcgatggcgacggcgtggtcggcgaacagccggtcctgcgcccgggagagagccacgattatgtcagcggttgcccgctcggcacgccttacggttcgatggaaggcttctacaccttccaccgcgaggatggctcgaggatggaagtgcgcatcccgttcttcccgctcgccgcgccggagacggccgagaggtag

SEQ ID NO: 5071 - protein, 133 aa, Erythrobacter litoralis HTCC2594
MKELFQHAANTDDVIVRVAVNFLPEQSQPSAGKWFWVYHIRIENHSNERVQLMTRHWRITDAREMVNHVDGDGVVGEQPVLRPGESHDYVSGCPLGTPYGSMEGFYTFHREDGSRMEVRIPFFPLAAPETAER

SEQ ID NO: 5072 - DNA, 420 bp, Novosphingobium aromaticivorans DSM 12444
  CDS (1)..(420): transl_table=11
atgtgcgatagtttgggggacatgaagcagcttttccagcatgccgcgataacggatggagtgacggtgcgggtcgccgtcagtttcctgccggaacagtcacgcgtcgacgccggcaagtggttctgggtctatcacatccggatcgagaacgatgccgcccagccgatccagcttctttcccggcactggcgcatcaccgacgggcgcgggatggtcaatttcgtcgacggggacggtgtggtgggcgagcagcccgtgctccagccggggcagtctcacgattatgtctcgggctgcccgctgggcacccatcacggcagcatggaaggccattacacgatgcagcgtgccgatggggcgctgttcgacgtggcgattccgttctttcctctggcggcaccggctccggcaaactaa

SEQ ID NO: 5073 - protein, 139 aa, Novosphingobium aromaticivorans DSM 12444
MCDSLGDMKQLFQHAAITDGVTVRVAVSFLPEQSRVDAGKWFWVYHIRIENDAAQPIQLLSRHWRITDGRGMVNFVDGDGVVGEQPVLQPGQSHDYVSGCPLGTHHGSMEGHYTMQRADGALFDVAIPFFPLAAPAPAN

SEQ ID NO: 5074 - DNA, 393 bp, Rhodoferax ferrireducens T118
  CDS (1)..(393): transl_table=11
atgtcccagtaccagtttcgcgttgaagtcgagtctcgctatcttgccgaccagtcagcaccacagcaagacctgtatgtgttcgcttacaccatcaccatcatcaatgtggggcaggtcagtgcccagttgatctcacgcacctggaacgtgaacgacgccaacggccacaccgagcgcgtgaagggcctgggtgtggtcgggcagcagcctctgctcaaacccggtgaagcgtttgaatacaccagcggcacccgcctgcgcacccccacgggcaccatgcatggcagctttttttgcgtcgccgaagacggcgaaaagttcgatgtcgatgtgccgatgtttgtgctcgatggcctgagccccagcggcggcgcgcgcacactgcactga

SEQ ID NO: 5075 - protein, 130 aa, Rhodoferax ferrireducens T118
MSQYQFRVEVESRYLADQSAPQQDLYVFAYTITIINVGQVSAQLISRTWNVNDANGHTERVKGLGVVGQQPLLKPGEAFEYTSGTRLRTPTGTMHGSFFCVAEDGEKFDVDVPMFVLDGLSPSGGARTLH

SEQ ID NO: 5076 - DNA, 372 bp, Saccharophagus degradans 2-40
  CDS (1)..(372): transl_table=11
atgccacacgcaataaatatagaagtaaaaaccaaataccttagcgaacagtcccgcccagcggaaaataaatacgtgttcgcctacaccattacaattaccaaccaaggcgaccaacccgcacagctcgttggccgctactggcgcatagtggatgcaaacagccaaatacaagaagtacaggggataggcgtggtaggtgaacaaccgcacctcgcaccgagcgaaagctatacctacaccagcggcgcggtattgcaaacacctaccggcacaatggaaggccactacgaaatgcagggggaaggcggcgaaacctttaacgcaaccattcccgcctttgcattagtgaagccctctttattacactag

SEQ ID NO: 5077 - protein, 123 aa, Saccharophagus degradans 2-40
MPHAINIEVKTKYLSEQSRPAENKYVFAYTITITNQGDQPAQLVGRYWRIVDANSQIQEVQGIGVVGEQPHLAPSESYTYTSGAVLQTPTGTMEGHYEMQGEGGETFNATIPAFALVKPSLLH

SEQ ID NO: 5078 - DNA, 381 bp, Shewanella denitrificans OS217
  CDS (1)..(381): transl_table=11
atgagttttccaatagacagcataaaaattaaggttgagagtcatttccttgcacagcaatcatcgctgctagaaggcaaatacgtattctcatacactgtcactatcgtcaatctcagtgatatcaatgtcacattaaagagtcgccactggataatcaccgatgccaatggtgcagaaagccaagtcaaaggacctggcgtcgtgggtgaaaccccgactatagccccaaataatgcttatcaatataccagtggtactgtgtttgaaaccccagtcggttttatgcatggccgttacaccatggaaagtggcctaggcgagacctttgaagccagtattccctcatttcgcttagctatgcctggcgttatgcagtaa

SEQ ID NO: 5079 - protein, 126 aa, Shewanella denitrificans OS217
MSFPIDSIKIKVESHFLAQQSSLLEGKYVFSYTVTIVNLSDINVTLKSRHWIITDANGAESQVKGPGVVGETPTIAPNNAYQYTSGTVFETPVGFMHGRYTMESGLGETFEASIPSFRLAMPGVMQ

SEQ ID NO: 5080 - DNA, 423 bp, Rhodopseudomonas palustris BisB5
  CDS (1)..(423): transl_table=11
atgattgcgattcaagctggaacaactctcatgtaccgcgccgtaactcgccagatcgaggtgactgtcgaaccgaattacctccccgagcgctcctcggcggaaaaccgacagtttttctggtcctataccgtggtcatcaccaattcgggcgacgagaccgtgcagttgcgcacccggcattgggtgatcaccgacgcgtccggccgcacccaggaagtccgcggtgaaggcgtggtcggcgaacagccggtgctcgcgcccggcgaacggttcgaatacaccagcggggtcccgctcccgaccgcctccggcttcatggccggccgctaccagatggaaagcgaaagcggcgaaaaattcgaaatcgacgtcccggcgttctcgctcgacagcccggaaggcaagcggacgttgaattga

SEQ ID NO: 5081 - protein, 140 aa, Rhodopseudomonas palustris BisB5
MIAIQAGTTLMYRAVTRQIEVTVEPNYLPERSSAENRQFFWSYTVVITNSGDETVQLRTRHWVITDASGRTQEVRGEGVVGEQPVLAPGERFEYTSGVPLPTASGFMAGRYQMESESGEKFEIDVPAFSLDSPEGKRTLN

SEQ ID NO: 5082 - DNA, 375 bp, Ralstonia metallidurans CH34
  CDS (1)..(375): transl_table=11
atgagcgagtacgcattttccgtggccgtgcgcacgcagtacatgccggaccaatcggacccagaccgtggacgctacgcgttcgcctacaccatcacgatccacaacaccggcgaagtcgccgcgcagctgatctcgcgccactggatcatcaccgacagcgacaactcgacgcaggaagtctcgggcctgggcgtggtcggccatcagccgctgctcaagccgggcgagcacttcgagtattcgagctgggcgacgatctccaccccggtgggatcgatgaagggcgattatttctgcgtggccgaagacggccaccgtttcgaggtgccgattcccgaattcgcgctggtgctgccccgaatgctgcactga

SEQ ID NO: 5083 - protein, 124 aa, Ralstonia metallidurans CH34
MSEYAFSVAVRTQYMPDQSDPDRGRYAFAYTITIHNTGEVAAQLISRHWIITDSDNSTQEVSGLGVVGHQPLLKPGEHFEYSSWATISTPVGSMKGDYFCVAEDGHRFEVPIPEFALVLPRMLH

SEQ ID NO: 5084 - DNA, 393 bp, Deinococcus geothermalis DSM 11300
  CDS (1)..(393): transl_table=11
atgagccaagcgaccgacaccccctcaccggacgtgcgcgtgagcgtggacgtctcctatctgcccgcccactccaccccggagcgccgcgtttttgcctacgtcatccgcatcgaaaactgcagcgatcaaacctggcaactcctggcgcggcactgggacatcctcgacgccgggggccgcgagactgttgtggatggcgagggtgtggtgggcgagcagccggtgatcccgcccggcggggccttcgtctacaactccttcgtgacgctggaggacaccccgggacggatgcagggctactacgtgatgcaggacgcctggggattgcgggcgcgagtgccgattccaccgttccggctggaggtgccgggggagcggatgtggcactga

SEQ ID NO: 5085 - protein, 130 aa, Deinococcus geothermalis DSM 11300
MSQATDTPSPDVRVSVDVSYLPAHSTPERRVFAYVIRIENCSDQTWQLLARHWDILDAGGRETVVDGEGVVGEQPVIPPGGAFVYNSFVTLEDTPGRMQGYYVMQDAWGLRARVPIPPFRLEVPGERMWH

SEQ ID NO: 5086 - DNA, 381 bp, Pseudomonas entomophila L48
  CDS (1)..(381): transl_table=11
atgtccgaccctcgctaccagatcgacgtcagcgtcgtgacccgctatctcaaagatcaatccgaccccgaaaacgaccgtttcgccttcgcctacaccatcaccgtgcagaacaacggcacggtgaaagccaagctgatgtcccggcactggctgatcaccaacggcgatggcgaagtcgaggaagtccggggcgcgggcgtgatcggccagcaaccgctgatcgagcccggccagagccacacctacagcagcggtgcggtgatcagcacccgcgtcggcaccatgcagggcagctaccagatgttcgccgaggacggtaaacgcttcgatgcgacgatcgcgccgttccgcctggcggtgcccggagcgctgcactga

SEQ ID NO: 5087 - protein, 126 aa, Pseudomonas entomophila L48
MSDPRYQIDVSVVTRYLKDQSDPENDRFAFAYTITVQNNGTVKAKLMSRHWLITNGDGEVEEVRGAGVIGQQPLIEPGQSHTYSSGAVISTRVGTMQGSYQMFAEDGKRFDATIAPFRLAVPGALH

SEQ ID NO: 5088 - DNA, 402 bp, Sphingopyxis alaskensis RB2256
  CDS (1)..(402): transl_table=11
atgatcgactccttctttcccttctcggcgaccaccggacccgtgacggtgcgcgtggcggtgagctatctgcccgaacagtcgcatccggcgctcggtcgctggttctgggcctatcatgtgcgggtcgaaaaccatggcgacagcgcggtgcagctgctctcgcgccactggcggatcagcgacgcgcgcgggcaggtgagcgaggtcgagggcgagggtgtggttggcgaacagccgctgatcggcgcgggcggggcctatgactatgtctccggctgcccgctgccgacgcccgaagggtcgatggtcggcagctatacgatggagatgagcgacggatcgcagatgctcgtcgcgatcccgcacttccctctggtggcgcccgcgacggcatcatga

SEQ ID NO: 5089 - protein, 133 aa, Sphingopyxis alaskensis RB2256
MIDSFFPFSATTGPVTVRVAVSYLPEQSHPALGRWFWAYHVRVENHGDSAVQLLSRHWRISDARGQVSEVEGEGVVGEQPLIGAGGAYDYVSGCPLPTPEGSMVGSYTMEMSDGSQMLVAIPHFPLVAPATAS

SEQ ID NO: 5090 - DNA, 387 bp, Myxococcus xanthus DK 1622
  CDS (1)..(387): transl_table=11
atgtcctccagcgccatcaccgacggcatccgcatcaccgtgaagcccgcctactggccggagcgcagcgctccggagtccgggcagttcgccttcatgtacacggtggagattgccaacgagggcgacgcgccggcgcagctcaaggcgcgccattgggtcatcaccgatgccacgggcaaggtggaagaggtgaggggcgagggcgtggtgggccgccagccccacctggggcccggagagcggttcgagtacacgagttgggccatgctgcgcacgcccttcggcaccatgcgcggcacctatgacatggtgcggccggacggcacgcacttcgaagcgcgcatcgccgagttcgcgctcacccttcccaactccctgcactga

SEQ ID NO: 5091 - protein, 128 aa, Myxococcus xanthus DK 1622
MSSSAITDGIRITVKPAYWPERSAPESGQFAFMYTVEIANEGDAPAQLKARHWVITDATGKVEEVRGEGVVGRQPHLGPGERFEYTSWAMLRTPFGTMRGTYDMVRPDGTHFEARIAEFALTLPNSLH

SEQ ID NO: 5092 - DNA, 402 bp, Pseudoalteromonas atlantica T6c
  CDS (1)..(402): transl_table=11
atgacaagttcattaagtacgggtcacgagctaagtgataaaattaaggttgttgtacacacccagcatttaccagagcataccgccaatgaggcggacaaatacgcttttgcttatgaaattaacattgccaataagagtgacgaaagtgtgcagcttatcaaccgttattggctcatcattgacggcaatggcaaacaatctgaagtagaaggcgctggcgttgttggtcagcaaccacacatcgaaagtggcgatagctttcaatatactagcggcgctgtgcttgatacccccgtaggctcaatgcaaggttattacgaaatgcaggataaagatggcgcactctttcgtgtacccattgatattttccgcctagccgtccctcatcaaatcaactag

SEQ ID NO: 5093 - protein, 133 aa, Pseudoalteromonas atlantica T6c
MTSSLSTGHELSDKIKVVVHTQHLPEHTANEADKYAFAYEINIANKSDESVQLINRYWLIIDGNGKQSEVEGAGVVGQQPHIESGDSFQYTSGAVLDTPVGSMQGYYEMQDKDGALFRVPIDIFRLAVPHQIN

SEQ ID NO: 5094 - DNA, 417 bp, Alcanivorax borkumensis SK2
  CDS (1)..(417): transl_table=11
atgagcgtcaccgaaccaggtagcgacaacaccgccaacggcgactccaatcacaacatacagatatcggtggaaaccgaatttctacccgatcagagtgatgaagaaagccaacgctgggtctttgcctaccacattagcattctcaacaaaggctctgtcagcgcccgtttgctaacccgccactgggtgatcaccgacggcgaagagcgcgttcaggaagtccatggcgagggggttatcggcgaacaaccccacatcgcccccggccaaaccttccgctacaccagcggtgccattctggaaacggaggtgggcagcatgcgcggcagttaccagatgatcgccgaagacggcagccacttcgatgcacaggttccggccttcaccctagccgcaccacatgcattgcactga

SEQ ID NO: 5095 - protein, 138 aa, Alcanivorax borkumensis SK2
MSVTEPGSDNTANGDSNHNIQISVETEFLPDQSDEESQRWVFAYHISILNKGSVSARLLTRHWVITDGEERVQEVHGEGVIGEQPHIAPGQTFRYTSGAILETEVGSMRGSYQMIAEDGSHFDAQVPAFTLAAPHALH

SEQ ID NO: 5096 - DNA, 381 bp, Shewanella sp. MR-4
  CDS (1)..(381): transl_table=11
atgagcgcattggatgactcaatccgagtcgaagtcaaaaccgaatacattgaacaacagtcctcgcccgaggatcagaaatacctctttagctacactatcaccatagttaacctcggtgagcaagccgccaaacttgaaacccgccactggattattaccgacgccaacggcaaaatcagtgaagtgcaaggcgcaggcgtcgtcggcgaaaccccaacgattccccccaataccgcctaccaatatactagcggcaccgtactcgatacgccccttggcattatgtatggcacttatggtatggtcagcgaatctggcgaacgttttaaggcgacgattaagcccttccgtttagcactccccggtttattacactga

SEQ ID NO: 5097 - protein, 126 aa, Shewanella sp. MR-4
MSALDDSIRVEVKTEYIEQQSSPEDQKYLFSYTITIVNLGEQAAKLETRHWIITDANGKISEVQGAGVVGETPTIPPNTAYQYTSGTVLDTPLGIMYGTYGMVSESGERFKATIKPFRLALPGLLH

SEQ ID NO: 5098 - DNA, 381 bp, Shewanella sp. MR-7
  CDS (1)..(381): transl_table=11
atgagcgcattggatgactcaatccgagtcgaagtcaaaaccgaatacattgaacaacagtcctcgcccgaggatcagaaatacctctttagctacactatcaccatagttaacctcggtgagcaagccgccaaactcgaaacccgccactggattattaccgacgccaacggcaaaatcactgaagtacaaggcgcaggcgttgtcggcgaaaccccaacgatcccccccaataccgcctatcaatataccagcggtaccgtactcgatacgccccttggcattatgtatggcacttatggtatggtcagcgaatctggcgaacgttttaaggcgacgattaagcccttccgtttagcactccccggtttattacactga

SEQ ID NO: 5099 - protein, 126 aa, Shewanella sp. MR-7
MSALDDSIRVEVKTEYIEQQSSPEDQKYLFSYTITIVNLGEQAAKLETRHWIITDANGKITEVQGAGVVGETPTIPPNTAYQYTSGTVLDTPLGIMYGTYGMVSESGERFKATIKPFRLALPGLLH

SEQ ID NO: 5100 - DNA, 387 bp, Alkalilimnicola ehrlichii MLHE-1
  CDS (1)..(387): transl_table=11
atgagcgacgagcaggagcgctactgcatcgaggtggacgtggatccggcctacgtggcggatcagtctgatccggccgaggaccgctacgtcttctcctataccatcaccatcaagaacctgggcgcggtgaccgcccaggtggtcagccgccactgggtgatcaccgacggcagcggtcacgagcgcgaggtgcgtggcgagggtgtggtcggcgagcagccccgcatcaagcccggcgagggctttcgctacaccagcggggccatcctggagacgccggtgggcagcatgcacggcagctaccacctggtggccgaagacggcacggtcttcaacgccgatattcccgcctttaccctggctgtgccgcacacgctgcattaa

SEQ ID NO: 5101 - protein, 128 aa, Alkalilimnicola ehrlichii MLHE-1
MSDEQERYCIEVDVDPAYVADQSDPAEDRYVFSYTITIKNLGAVTAQVVSRHWVITDGSGHEREVRGEGVVGEQPRIKPGEGFRYTSGAILETPVGSMHGSYHLVAEDGTVFNADIPAFTLAVPHTLH

SEQ ID NO: 5102 - DNA, 510 bp, Granulibacter bethesdensis CGDNIH1
  CDS (1)..(510): transl_table=11
ttgtgcgaccccaatccggcctggcgccattgcgatcaggggcgaggcccctcattctatagacatgtctgtcagcaccacacgattgatgatcctctcatgagcgatgataacacgtatgtctgcgtgacccggcacatccgggtgaccgtccagccaatctatctggccgatcagtcccgccccgatggtcaccatttcgtatgggcctatcgggtctgtatcgccaatgaaggttcttccacggttcagctgcttcaacgtacctggcatatcaccaatgcgctgggccatacccagcatattcacggtgacggcgtggtaggggagcagcctgtgctggaacccggtgaagaattcaactacacgtccggcacgccgctcgatacgccctccggctttatgcacggaacatatcatatgatcgaaacgtcctccggtgaggccttcgacatcaccattccggccttcagcctcgacagcccccatcagaacacaaagctgcattga

SEQ ID NO: 5103 - protein, 169 aa, Granulibacter bethesdensis CGDNIH1
MCDPNPAWRHCDQGRGPSFYRHVCQHHTIDDPLMSDDNTYVCVTRHIRVTVQPIYLADQSRPDGHHFVWAYRVCIANEGSSTVQLLQRTWHITNALGHTQHIHGDGVVGEQPVLEPGEEFNYTSGTPLDTPSGFMHGTYHMIETSSGEAFDITIPAFSLDSPHQNTKLH

SEQ ID NO: 5104 - DNA, 384 bp, Nitrosomonas eutropha C91
  CDS (1)..(384): transl_table=11
atgaaaaacgaccaaaaatacgacatcaaggtgcaagtgcgtaccacttatctgcaggatcaatccgatcccgcgcaggagcagtatgtgtttgcttatacgattacgatcaataatatcggcagcgtggcttcgcagctggtgagccgtcactggatcatcactggtggcgatggggagacacgggaggtgcgcggattgggcgtggtgggagagcagccgctacttaaacccggcgaaagttttgaatacaccagcggcactgcgatttcctcaatagcgggttccatgaaaggttcttatcagatggtggccgaggatggttttcatttttcggtggaaattcctgagttcattctgagtgtgccgcgcgtgctgcactga

SEQ ID NO: 5105 - protein, 127 aa, Nitrosomonas eutropha C91
MKNDQKYDIKVQVRTTYLQDQSDPAQEQYVFAYTITINNIGSVASQLVSRHWIITGGDGETREVRGLGVVGEQPLLKPGESFEYTSGTAISSIAGSMKGSYQMVAEDGFHFSVEIPEFILSVPRVLH

SEQ ID NO: 5106 - DNA, 381 bp, Shewanella frigidimarina NCIMB 400
  CDS (1)..(381): transl_table=11
atgagccaagttgaatcgcctattaaaattaaagtcgacacccaatacttagaacaacaatcagatgtcgccgataataaatacctatttagctataccattaccatcatcaacctgggtgataacaaggtgactcttaaagaccgtcattggattatcactgacgctgacggcgaacagaatgaagtaaaaggccccggtgttgtaggggaaacccccacaattgcacctaatacggcttaccaatataccagtggcactgtaatggaaacgccagtgggctttatgcaaggatcttatggtatggaaaatcataaaggcgagcgatttgtagcaacaattccgccttttcgtcttgctgttcctgggatattccaataa

SEQ ID NO: 5107 - protein, 126 aa, Shewanella frigidimarina NCIMB 400
MSQVESPIKIKVDTQYLEQQSDVADNKYLFSYTITIINLGDNKVTLKDRHWIITDADGEQNEVKGPGVVGETPTIAPNTAYQYTSGTVMETPVGFMQGSYGMENHKGERFVATIPPFRLAVPGIFQ

SEQ ID NO: 5108 - DNA, 393 bp, Maricaulis maris MCS10
  CDS (1)..(393): transl_table=11
atgtatgagcacgaaagctgcggcgtgcggatcagtgtcagtcctgactatctggaagacgagagcacgccggaagaaggccgctttgtctgggcctatacgatcgagatcgagaacaccgggaaacagcctgtacagctgatcgcccgcaaatggatgatcaccgacgccaatgggcgcaccgagcatgtgcaaggcatgggcgtgatcggcgagcagccggtgatcgagccaggaggccgcttccgctacacatccggcgcgcctctcccgacgccgtcaggtttcatgagcggcagttacgaaatgcgacgcggcgatggtgaaagtttcgcggcaaccattcccgatttctcgctggatcggccgtccgaccgtttgtggctgcactga

SEQ ID NO: 5109 - protein, 130 aa, Maricaulis maris MCS10
MYEHESCGVRISVSPDYLEDESTPEEGRFVWAYTIEIENTGKQPVQLIARKWMITDANGRTEHVQGMGVIGEQPVIEPGGRFRYTSGAPLPTPSGFMSGSYEMRRGDGESFAATIPDFSLDRPSDRLWLH

SEQ ID NO: 5110 - DNA, 417 bp, Hyphomonas neptunium ATCC 15444
  CDS (1)..(417): transl_table=11
atggcaagacgccccgctcctccacagtatgaggccatcaccgatggcgtgcgcattcgtgtgcgccccaaattcctgcacgacgaatccgagccgacgcgggccaagttcatgtggcagtatacggtggaggtcgagaatgagagcgaccggacctggaccatcatccgccggcattggcggatcgtggattcggccgggcggcttcaggcggtcgatggcgaaggcgtgatcgggcagacgccgacggtcgggccggggcagcgtttcagctatacatccggcgcgccgctggcgacgccttcgggcatgatgacgggcacctatgacctcgtcgatgacgcgggcgaagagatggtggcgatgatccccgccttctcgctcgacagcccgtacgatacgtcgcggccgagctga

SEQ ID NO: 5111 - protein, 138 aa, Hyphomonas neptunium ATCC 15444
MARRPAPPQYEAITDGVRIRVRPKFLHDESEPTRAKFMWQYTVEVENESDRTWTIIRRHWRIVDSAGRLQAVDGEGVIGQTPTVGPGQRFSYTSGAPLATPSGMMTGTYDLVDDAGEEMVAMIPAFSLDSPYDTSRPS

SEQ ID NO: 5112 - DNA, 375 bp, Bordetella avium 197N
  CDS (1)..(375): transl_table=11
ttgaaaccttacgatctgaccgtatccgtgaccccgcgttttgtgccggagcagtccgatcccagtcagcagcaatacgtttttgcttatacggtgcgcattaccaacaccggctcgcagccggctcaggtcatcagccgccactggatcatcagcgacggcaatcagcaggtgcaggaagtccgcggcctgggggtggtcgggcagcagcccctgcttgccccaggcgagaccttcgaatacaccagcggctgtccgttgccgacaccggtcggaaccatgcgcggcacgtatcactgcgtgggtgaaaacggtattcccttcgaggtgccgatcgacgagttcgtgctcgccatgccccgcacgttgcattga

SEQ ID NO: 5113 - protein, 124 aa, Bordetella avium 197N
MKPYDLTVSVTPRFVPEQSDPSQQQYVFAYTVRITNTGSQPAQVISRHWIISDGNQQVQEVRGLGVVGQQPLLAPGETFEYTSGCPLPTPVGTMRGTYHCVGENGIPFEVPIDEFVLAMPRTLH

SEQ ID NO: 5114 - DNA, 363 bp, Aeromonas hydrophila subsp. hydrophila ATCC 7966
  CDS (1)..(363): transl_table=11
gtggcaactccgcacatagtcatccgcccatacccccgttatgtggcggattccaaagacccttaccagttccactatctcatcgagatcgagaacctggggccgggcccggcgcagctgctgcaccggcgctggctcatcaccgatgccaatggcaagatgctggaagtcgaaggccccggcgtggtcggcgagcagccggtgatcgcagagggagagaccttccgctatcaaagcggcgtgccgctggccactccgctcggggtgatggaagggagttataccctgcaaggcgagtcggggcagcaattcgaggcgcccatcgcaccctttacgctggccgtcccccacattatcaactga

SEQ ID NO: 5115 - protein, 120 aa, Aeromonas hydrophila subsp. hydrophila ATCC 7966
MATPHIVIRPYPRYVADSKDPYQFHYLIEIENLGPGPAQLLHRRWLITDANGKMLEVEGPGVVGEQPVIAEGETFRYQSGVPLATPLGVMEGSYTLQGESGQQFEAPIAPFTLAVPHIIN

SEQ ID NO: 5116 - DNA, 381 bp, Magnetococcus sp. MC-1
  CDS (1)..(381): transl_table=11
atggctaacgaaaaataccaagtggatgtccaggtaaacgcgacctatctgccggatcaatccttgcctgcacataatcaatatgtgtttgcttacaccgtgaccctccttaatcgtggcagtatgggggccaaactgctctcgcgtcactggattattagtgatgccaacgggggtgagcaagaggtgcggggtgagggtgtggtgggggaacagccccatttaaatcccggggagagttttcaatataccagcggtacccccctaacgacgcctatgggtagcatgcggggcagctaccagatggtggccgacgatggaacctattttgaggccaccattccaccctttgccctgtttggaccggccactctgcactag

SEQ ID NO: 5117 - protein, 126 aa, Magnetococcus sp. MC-1
MANEKYQVDVQVNATYLPDQSLPAHNQYVFAYTVTLLNRGSMGAKLLSRHWIISDANGGEQEVRGEGVVGEQPHLNPGESFQYTSGTPLTTPMGSMRGSYQMVADDGTYFEATIPPFALFGPATLH

SEQ ID NO: 5118 - DNA, 381 bp, Shewanella sp. ANA-3
  CDS (1)..(381): transl_table=11
atgagcgcattggatgactcaatccgagtcgaagtcaaaaccgaatacattgaacaacagtcctcgcccgaggatcagaaatacctctttagctacactatcaccatcatcaacctcggtgaacaagccgccaaactcgaaacccgccactggattattaccgatgccaacggcaaaatcagtgaagtacaaggcgcaggtgtcgtcggcgaaaccccaaccattccccccaataccgcctaccaatatactagcggtaccgtactcgatacgccccttggcattatgtatggcacttatggtatggtcagcgaatcaggcgagcactttaaggcaacgattaagcccttccgcttagcactccccggtttattacattga

SEQ ID NO: 5119 - protein, 126 aa, Shewanella sp. ANA-3
MSALDDSIRVEVKTEYIEQQSSPEDQKYLFSYTITIINLGEQAAKLETRHWIITDANGKISEVQGAGVVGETPTIPPNTAYQYTSGTVLDTPLGIMYGTYGMVSESGEHFKATIKPFRLALPGLLH

SEQ ID NO: 5120 - DNA, 372 bp, Candidatus Ruthia magnifica str. Cm (Calyptogena magnifica)
  CDS (1)..(372): transl_table=11
atgaaaaacaacattgaaatagaggttaaagtgacttatttggagcatcagtctgatgtttatgcaagtcagtactcctatgcttacaccattacaattattaacaagggcaatgttggcgtgcaacttttaacacgtcattggcgtattcaagatgaaactggatatattgaagatgttattggcgaaggtgtgattggtcaacagcctcatttggcgtcaggagaatcttttcagtacgcctcaggtgctattatcaaaaccttaactggttccatgaaaggctcttatggtatggttgatgactatggcgagcgttttaatgtgcaaattcctgaatttgtgctcagcaaaccttatacgctacattaa

SEQ ID NO: 5121 - protein, 123 aa, Candidatus Ruthia magnifica str. Cm (Calyptogena magnifica)
MKNNIEIEVKVTYLEHQSDVYASQYSYAYTITIINKGNVGVQLLTRHWRIQDETGYIEDVIGEGVIGQQPHLASGESFQYASGAIIKTLTGSMKGSYGMVDDYGERFNVQIPEFVLSKPYTLH

SEQ ID NO: 5122 - DNA, 387 bp, Shewanella amazonensis SB2B
  CDS (1)..(387): transl_table=11
atgacgatgaccgacgtagatcccgcaatcaaggttgaggtaaataccgaatacctggaagagcaatccacgcccgcagagcacaagtacgtgttcagctacaccatcaccatcattaatctgggcgaccgagccgccaaactggagagccgtcactggattatcacagatgccaacggtcacataaccgaagtgcagggtgccggcgtggtgggtgaaacccccaccatacctcccaacaccgcatatcagtacaccagtggcactgtgatggaaacaccggtcggctttatggaaggccgctacggtatggtctgggaagatggaaaaccgtttcaggccgccattcccaccttccgcctggccgtgcccggcgtactgcattaa

SEQ ID NO: 5123 - protein, 128 aa, Shewanella amazonensis SB2B
MTMTDVDPAIKVEVNTEYLEEQSTPAEHKYVFSYTITIINLGDRAAKLESRHWIITDANGHITEVQGAGVVGETPTIPPNTAYQYTSGTVMETPVGFMEGRYGMVWEDGKPFQAAIPTFRLAVPGVLH

SEQ ID NO: 5124 - DNA, 384 bp, Azoarcus sp. BH72
  CDS (1)..(384): transl_table=11
atgagcaaatcggaaacctaccgcatcgaggtcgaagccgtcgccgaatacgtcgaggcccagtccaaccccgaggacgatcactacgtcttcgcctacaacatcaccatccgcaacaccggcacggtcgcagcccgcctcgtcagccgccactgggtcatcaccgacggtaccgggcacgtgcaggaagtgcatggtcagggcgtggtcggcgaacagcccctgctcgcgccgggcgaaagcttccgctacaccagcggctcggtgctcgaaaccgcggtcggcaccatgcacggcagctaccagatggaagcgtcggacgggcatcgtttcgacgcgccgatccccgctttcatgctggcgatgccgcgcgtgcttcactga

SEQ ID NO: 5125 - protein, 127 aa, Azoarcus sp. BH72
MSKSETYRIEVEAVAEYVEAQSNPEDDHYVFAYNITIRNTGTVAARLVSRHWVITDGTGHVQEVHGQGVVGEQPLLAPGESFRYTSGSVLETAVGTMHGSYQMEASDGHRFDAPIPAFMLAMPRVLH

SEQ ID NO: 5126 - DNA, 381 bp, Shewanella sp. W3-18-1
  CDS (1)..(381): transl_table=11
atgagcgcattggacacctcaattcgagttgaagttaaaactgaatatattgagcagcaatcctcccccgaggatgaaaaatacttatttagctacactatcacgattatcaatttgggcgagcaagcggcaaaactcgagactcgtcactggataattacagatgcaaatggcaataccagcgaggttcaaggtgcaggtgtcgttggcgaaacgcccaccattcctcccaatacggcttatcaatataccagtggtaccctacttgatactcctcttggcatcatgcacggtacttatggtatggtcagcgagtcaggggaacgctttgaagcgataataaaacccttccgcttagcgactccaggtttattacattga

SEQ ID NO: 5127 - protein, 126 aa, Shewanella sp. W3-18-1
MSALDTSIRVEVKTEYIEQQSSPEDEKYLFSYTITIINLGEQAAKLETRHWIITDANGNTSEVQGAGVVGETPTIPPNTAYQYTSGTLLDTPLGIMHGTYGMVSESGERFEAIIKPFRLATPGLLH

SEQ ID NO: 5128 - DNA, 429 bp, Polaromonas naphthalenivorans CJ2
  CDS (1)..(429): transl_table=11
atggcggccaaaccgattttcatgccatgccccatgtccaaataccaattttcctgcgaagtcctgccccagtacctgcctgagcaatcggcgccggagcacgggctgtatggcttttcctacaccgtcaccataaccaacaccggcgaagttgcggcgcagctgatctcgcggcactggatcatcagcgacgccaacggccacaacgaagaggtcaagggcctgggcgtggtcggccagcagccgctgctcaagcccggcgaatccttccagtacaccagcggctcgcgcctgcgcacccccagcggcaccatgcacggcagctacttttgcgtggccgaggacggcgagcgcttcgaggtggtggttcccctgtttgtactggaagcgatgaacggcagcagcccctccgggcgcgtcctgcactga

SEQ ID NO: 5129 - protein, 142 aa, Polaromonas naphthalenivorans CJ2
MAAKPIFMPCPMSKYQFSCEVLPQYLPEQSAPEHGLYGFSYTVTITNTGEVAAQLISRHWIISDANGHNEEVKGLGVVGQQPLLKPGESFQYTSGSRLRTPSGTMHGSYFCVAEDGERFEVVVPLFVLEAMNGSSPSGRVLH

SEQ ID NO: 5130 - DNA, 414 bp, Acidovorax sp. JS42
  CDS (1)..(414): transl_table=11
atgccgaaataccagttccaggtgcaggtgcaggtgcaaccgcagtaccttcccgaccagtccgcgcccgacgaaggcgtatacagctttgcctacaccatcacgatcaccaacacgggcgacgtgaccgcgcagctgatttcacgccactggatcatctccgacgccaatggccacaccgagcaggtcaagggcctgggcgtggtgggccaacaaccgctgctcaagcccggcgaggcatttcagtacaccagcggctgccgcctgcgcaccgccagcggcagcatgcacggcagctatttctgcgtggccgaggatggtgagccgttcacctgtccgatcgagctgttcgtgctggaggccttctcgcccggccaaccgggccagcccatggcggcaagggtgctgcattga

SEQ ID NO: 5131 - protein, 137 aa, Acidovorax sp. JS42
MPKYQFQVQVQVQPQYLPDQSAPDEGVYSFAYTITITNTGDVTAQLISRHWIISDANGHTEQVKGLGVVGQQPLLKPGEAFQYTSGCRLRTASGSMHGSYFCVAEDGEPFTCPIELFVLEAFSPGQPGQPMAARVLH

SEQ ID NO: 5132 - DNA, 408 bp, Verminephrobacter eiseniae EF01-2
  CDS (1)..(408): transl_table=11
atgccaaagtaccagttcgatgtgcaagtgcagccccaatacctgcccgaggagtctgcgccggacaccggggtgttctgctttgcctacacgattaccgtcaccaacaccgggcaggttccggcgcaactgatttcccggcactggatcatcaatgactcgggcggccttgccgaagaggtcaagggcctgggcgtggtcgggcgccagcccctgctcaagcccggcgagtcgtttcagtacaccagtggctgccggctgcacaccgccagcggcaccatgcacggcagtttccattgcgtggccgaggatggcgcgctcttcgtcaccccggtgccgctgttcgtgctggaagcgatcgaccatggcctgccggatgcgccgtcgggcgggcgggtgctgcattga

SEQ ID NO: 5133 - protein, 135 aa, Verminephrobacter eiseniae EF01-2
MPKYQFDVQVQPQYLPEESAPDTGVFCFAYTITVTNTGQVPAQLISRHWIINDSGGLAEEVKGLGVVGRQPLLKPGESFQYTSGCRLHTASGTMHGSFHCVAEDGALFVTPVPLFVLEAIDHGLPDAPSGGRVLH

SEQ ID NO: 5134 - DNA, 393 bp, Magnetospirillum magnetotacticum MS-1
  CDS (1)..(393): transl_table=11
atgtacagccagaccacccgagacgtcgaggtcagcgtcaagcccttctacctggacgaccagtcctcgcccgaagacaatcacttcgtctgggcctatcgcgtgcgcatcatcaacaaggggacccgtaccgtccagctcatgcgccgccactgggtcatcaccgacgccatcggccgggtacaggaagtcaagggaccgggagtggtgggcgaacagcccgttctgcgccccggcgatgcctatgaatacacgtccggcacgcccttgcccacgccgtccggcatcatggtcggcacctacgagatggaggacgaggacggctcggccttcgacatcgccatccccgctttttccctcgacagcccccatgagaaacccagactgaattag

SEQ ID NO: 5135 - protein, 130 aa, Magnetospirillum magnetotacticum MS-1
MYSQTTRDVEVSVKPFYLDDQSSPEDNHFVWAYRVRIINKGTRTVQLMRRHWVITDAIGRVQEVKGPGVVGEQPVLRPGDAYEYTSGTPLPTPSGIMVGTYEMEDEDGSAFDIAIPAFSLDSPHEKPRLN

SEQ ID NO: 5136 - DNA, 384 bp, Xylella fastidiosa Ann-1
  CDS (1)..(384): transl_table=11
atggaaaacaatcccaattcaaagattgaggtcgctgtctcgtcccgcttcctcgaccagcaatctaatcgtaatgaaggccgctacgtcttcgcctacaccatccggatctacaatgctggaaatgtccctgcacgactgatcgcgcgccactggcagattaccgatgcaaacggcaaagtcgaatacgtcactggtgaaggagtcattggagaacaaccacggctgcgtcccggcgaagaatttcgctacacctctggggtcgtgttgggaaccgaacagggccagatgcaaggacattacgacatgatggccgatgacggtaccgaattcaccgccacaatctccccattcgtactcagtgtgccgcgaacactacactga

SEQ ID NO: 5137 - protein, 127 aa, Xylella fastidiosa Ann-1
MENNPNSKIEVAVSSRFLDQQSNRNEGRYVFAYTIRIYNAGNVPARLIARHWQITDANGKVEYVTGEGVIGEQPRLRPGEEFRYTSGVVLGTEQGQMQGHYDMMADDGTEFTATISPFVLSVPRTLH

SEQ ID NO: 5138 - DNA, 375 bp, Ralstonia solanacearum UW551
  CDS (1)..(375): transl_table=11
atgtcccgctacgaactcaccgtccaggtccggacgcgctacctgcccgagcaatccgagccctcgcagggccagtacgccttcgcctacaccatcaccatccgcaataccggcgaggtgccgagccaactgatctcgcggcactggatcatcaccgatgcggagagccacgtgcaggaggtcgccggcctcggcgtggtcggccaccagccgctgctgccgccgggcgagtcgttcgaatacaccagttgggcgaccatcaagacgccggtgggcaccatgcgcggcgaatacttctgcgtggccgacgacggccaccgcttcgaggcgccgatccccgagttcgcgctggcgatgccgcgcatgctgcactga

SEQ ID NO: 5139 - protein, 124 aa, Ralstonia solanacearum UW551
MSRYELTVQVRTRYLPEQSEPSQGQYAFAYTITIRNTGEVPSQLISRHWIITDAESHVQEVAGLGVVGHQPLLPPGESFEYTSWATIKTPVGTMRGEYFCVADDGHRFEAPIPEFALAMPRMLH

SEQ ID NO: 5140 - DNA, 381 bp, Vibrio splendidus 12B01
  CDS (1)..(381): transl_table=11
atggatatatctacgccttgtatcaaatgtcaggttcactctaaatacatagaggaacaatctgaaccaacgaagaaccgctacgtcttcgcctacatcattaccatcaaaaacctcagcaaaacaacggttcaactcatgtctcgccgctggctgattaccgactccaacggcaaacaactcaccatagagggtgatggcgtagttgggcaacaacccgtgattgaggccaacgacgaatacacttacaccagtggtaccgtcatcgaaactcctgtgggtgttatgcaaggtcattatgtgatgacagataacaaaggcatcgacttcataactgaagtggatccatttagactcgcgatccctaatattcttaattag

SEQ ID NO: 5141 - protein, 126 aa, Vibrio splendidus 12B01
MDISTPCIKCQVHSKYIEEQSEPTKNRYVFAYIITIKNLSKTTVQLMSRRWLITDSNGKQLTIEGDGVVGQQPVIEANDEYTYTSGTVIETPVGVMQGHYVMTDNKGIDFITEVDPFRLAIPNILN

SEQ ID NO: 5142 - DNA, 414 bp, Parvularcula bermudensis HTCC2503
  CDS (1)..(414): transl_table=11
gtgcctgcctcccctccccacgcctatgaagaagtcacccgcgggatcaaaatcaccgtcgagccggacttcctcgaagaggagtcagagccccatgatgatcattacgtctggtcctataccgtgcgcatcgataacgcctcggatgtggtcgtccaattgagagaccgaacctggtacatcaccgatgccaatggacggacggtcaccgtcaccggcgatggagtcgtcggagagcaaccggtcctgcacccgggtgaggcctatgagtacacctccggctgcccgcttcgaacgccttcaggattgatggtagggagctatggcatggagaccgccagcggtgagtccttcaaggcccacatccccgccttttctctcgacagtccccatgatcgtccgcgcctcaactaa

SEQ ID NO: 5143 - protein, 137 aa, Parvularcula bermudensis HTCC2503
MPASPPHAYEEVTRGIKITVEPDFLEEESEPHDDHYVWSYTVRIDNASDVVVQLRDRTWYITDANGRTVTVTGDGVVGEQPVLHPGEAYEYTSGCPLRTPSGLMVGSYGMETASGESFKAHIPAFSLDSPHDRPRLN

SEQ ID NO: 5144 - DNA, 378 bp, Idiomarina baltica OS145
  CDS (1)..(378): transl_table=11
atgacggtaaaaacacaagtccatatcgaagtttctacgcaatatattgcggctcaatctaaccctaatcagggtcaatatgtgttttcgtataccataaagattagtaataacgctgcccaagacgtgacacttaaaagtcgcgagtggcgtattactgatgctgaaggaaaaatcacccgcgtcgctggcgaaggggtcattggccagcagccaacgattgcgccaggaaagtcatttagttataccagcggtactgttattgcgactccagtcggcatgatggagggtcattacttaatgttttctgagcaaggtgaacagtttaaggtgccaattccctcatttcgtttagccattcccaatattattcattag

SEQ ID NO: 5145 - protein, 125 aa, Idiomarina baltica OS145
MTVKTQVHIEVSTQYIAAQSNPNQGQYVFSYTIKISNNAAQDVTLKSREWRITDAEGKITRVAGEGVIGQQPTIAPGKSFSYTSGTVIATPVGMMEGHYLMFSEQGEQFKVPIPSFRLAIPNIIH

SEQ ID NO: 5146 - DNA, 396 bp, Nitrobacter sp. Nb-311A
  CDS (1)..(396): transl_table=11
atgtaccgtgccgttacccgccagatcgaagtcaccgtcgaaccgaatttcatgccggagagatcgtccgccgagcgaggccatttcttctggtcctatacggtggttatcaccaacgccggcccagataccgtgcagttgcgcactcggcactgggttattaccgacgcctcgggacgaaagcaggaggttcgcggcgagggcgtcgtaggcgagcagccggtgcttgcgcccggcgagcgcttcgaatacacgagtggcgttccgctgccgaccgccaccgggttcatgagcggccgctaccagatgatttcgatccggagtggcgaacccttcgaaatagacgttccgacgttctcgctcgacagtcccgacagcaagcgggtgctgaactga

SEQ ID NO: 5147 - protein, 131 aa, Nitrobacter sp. Nb-311A
MYRAVTRQIEVTVEPNFMPERSSAERGHFFWSYTVVITNAGPDTVQLRTRHWVITDASGRKQEVRGEGVVGEQPVLAPGERFEYTSGVPLPTATGFMSGRYQMISIRSGEPFEIDVPTFSLDSPDSKRVLN

SEQ ID NO: 5148 - DNA, 381 bp, Vibrio sp. MED222
  CDS (1)..(381): transl_table=11
atggatatatctacgccttgtatcaaatgccaagttcattctaaatatattgaagaacaatctgagccatctaagaatcgctacgttttcgcttacatcattaccatcaaaaatctaagtaaaacaacagtacaacttatgtctcgtcgctggctgattactgattccaacggtaaacaactcaccatagaaggtgatggcgtggttggacagcaacctgtgattgaagccaatgacgaatacacatacaccagtggcaccgtcatcgaaaccccagtgggagtcatgcagggacactatgtaatgaccgatcataaaggcattgatttcataacagaagtcgacccatttagactggccatccccaatattcttaactag

SEQ ID NO: 5149 - protein, 126 aa, Vibrio sp. MED222
MDISTPCIKCQVHSKYIEEQSEPSKNRYVFAYIITIKNLSKTTVQLMSRRWLITDSNGKQLTIEGDGVVGQQPVIEANDEYTYTSGTVIETPVGVMQGHYVMTDHKGIDFITEVDPFRLAIPNILN

SEQ ID NO: 5150 - DNA, 375 bp, Marinomonas sp. MED121
  CDS (1)..(375): transl_table=11
gtgtcaaagcatagtgttaaaatagaggttcaaaccgaatacctcccagaacaatcaacgcctgaagatgaacgctacgtatttgcttatcacgtcagtattcacaatgaaggcagtaacaaggtacaacttatttcgcgccattggataattaccgatggcaacgataaagtacaagaggtaaaaggctctggagttatcggcctgcaaccgcaactggaaagcggagaaagcttccaatattcaagcggtgctgtaatagattctcaagttggtgttatgcaaggtagctatcaaatgctagatgagaatggtcaacactttgaagctgaaatacccgctttcaaacttgccattcccaacattattcattag

SEQ ID NO: 5151 - protein, 124 aa, Marinomonas sp. MED121
MSKHSVKIEVQTEYLPEQSTPEDERYVFAYHVSIHNEGSNKVQLISRHWIITDGNDKVQEVKGSGVIGLQPQLESGESFQYSSGAVIDSQVGVMQGSYQMLDENGQHFEAEIPAFKLAIPNIIH

SEQ ID NO: 5152 - DNA, 420 bp, Congregibacter litoralis KT71
  CDS (1)..(420): transl_table=11
atgagtcagatcaagaccctgaatccggccctcattggcatcgcgacgcaaaccacgtatctgcccacccattcccgccccgaggacaatcagtacaccttcgcctacaccgttacgatcagtaatgcgggggacgtatcggtgcagctgctgtcccggttctggcagatcaccgacgccgacggcgatgtgcaggaggtgcgtggcgagggtgtggtcggtgagcaacccatcatccggcccgggcgctactttcgttacaccagcggtgccacactaccgacgcccgtgggctacatgaatggcgagtacacaatgatcctccatgacgacgatcgacctctggacctgaaagaccagctcgcctttgaggtacagattcccgcttttacccttcacacgcccacctccctaaactga

SEQ ID NO: 5153 - protein, 139 aa, Congregibacter litoralis KT71
MSQIKTLNPALIGIATQTTYLPTHSRPEDNQYTFAYTVTISNAGDVSVQLLSRFWQITDADGDVQEVRGEGVVGEQPIIRPGRYFRYTSGATLPTPVGYMNGEYTMILHDDDRPLDLKDQLAFEVQIPAFTLHTPTSLN

SEQ ID NO: 5154 - DNA, 387 bp, Polaribacter irgensii 23-P
  CDS (1)..(387): transl_table=11
atgatacaacaaatcacaaaaggagtaaaaatttcagtggaaactagctataatggcaccagttatcgcaacaatcaattgtactatattttctcatatacgattgtaattgaaaataacagtgcagaaaccatcaaattaacagaccgcttctggaccatcttcgactctttgaatggaatcgaaattgtcagtggagagggggttgtaggacagacaccaacgttagcacccaacataaattacacctacaaatctgggtgctttttaacttctaatctaggggcaatgaaaggtttttataccatgataaatttagaaacctatgagcagtttaaggtctacattcctactttccaactcagcacgcctgcactcttgaattag

SEQ ID NO: 5155 - protein, 128 aa, Polaribacter irgensii 23-P
MIQQITKGVKISVETSYNGTSYRNNQLYYIFSYTIVIENNSAETIKLTDRFWTIFDSLNGIEIVSGEGVVGQTPTLAPNINYTYKSGCFLTSNLGAMKGFYTMINLETYEQFKVYIPTFQLSTPALLN

SEQ ID NO: 5156 - DNA, 384 bp, Nitrococcus mobilis Nb-231
  CDS (1)..(384): transl_table=11
gtgaccgatcgggggcgctatgctgtggacgttaaagtggatgccgtctatctgccgacgcagtccaatccgacggagcgacgttatgcctttgcatacacggtgattatccgtaatacgggtgttgtggatgtaacgctgctcagtcgccattgggtcattacggatgccgagggtagagtgcgcgaggtgcggggcgagggcgtgatcggccagcaacccctgattgccccaggggagagttttaaatataccagcggcactgtaattgaaaccccggtgggcactatgcatggtagctatcgcctgcaggcctcggatggggtcgagttcgacgccgcaatcgatgcattccgcctggccgatcctcgcactgtgcattga

SEQ ID NO: 5157 - protein, 127 aa, Nitrococcus mobilis Nb-231
MTDRGRYAVDVKVDAVYLPTQSNPTERRYAFAYTVIIRNTGVVDVTLLSRHWVITDAEGRVREVRGEGVIGQQPLIAPGESFKYTSGTVIETPVGTMHGSYRLQASDGVEFDAAIDAFRLADPRTVH

SEQ ID NO: 5158 - DNA, 390 bp, Nitrococcus mobilis Nb-231
  CDS (1)..(390): transl_table=11
atggtaacttacgaagataatccatacttcatccgtgtcgaggttgagtcggtttacgtcgaggaagaatcggtacctgaccgaaacaggtacgcctttgcttacactgtgacaatccgtaacgaaggcgctatcgccgcgaaattgctaacccggcactggatcatcagcaacgccaacggcgaggtgcaggaagtgcatggcgaaggcgtagtcggcgagcaaccgcatttaggccctggcgaatgttttcagtacaccagcggcaccttcttggacaccgagttcggcagcatgcgtggtagctatcaaatgctcgctgatgacggcgtacactttgatgccgagattccggtgtttagcttgtcggtgccgcacacgttccattaa

SEQ ID NO: 5159 - protein, 129 aa, Nitrococcus mobilis Nb-231
MVTYEDNPYFIRVEVESVYVEEESVPDRNRYAFAYTVTIRNEGAIAAKLLTRHWIISNANGEVQEVHGEGVVGEQPHLGPGECFQYTSGTFLDTEFGSMRGSYQMLADDGVHFDAEIPVFSLSVPHTFH

SEQ ID NO: 5160 - DNA, 390 bp, Pseudoalteromonas tunicata D2
  CDS (1)..(390): transl_table=11
atgacaacaagcagtaatttaggctctccgattaaagttcaggtagaaacgttctacattgaaggccaatcggaaccagacagaaataagtttgtatttgcttatactatcacgataagaaaccacagcctttgtagtgcaaaactactaagccgttattggttaattactgatgcagatggcaaagaaaccgaagttgaaggcgaaggtgtaattggcgaacagccaaatattgcaccaggtgaaagctatacctacagcagcggcgcagtactcgatacaccacttggcaccatgcaaggtcattattgtatgcgtaatgagtttggtactgaattcaacgcacctatccctgtgtttcgtttaagtactccaaacctcgttcattaa

SEQ ID NO: 5161 - protein, 129 aa, Pseudoalteromonas tunicata D2
MTTSSNLGSPIKVQVETFYIEGQSEPDRNKFVFAYTITIRNHSLCSAKLLSRYWLITDADGKETEVEGEGVIGEQPNIAPGESYTYSSGAVLDTPLGTMQGHYCMRNEFGTEFNAPIPVFRLSTPNLVH

SEQ ID NO: 5162 - DNA, 384 bp, Photobacterium sp. SKA34
  CDS (1)..(384): transl_table=11
gtgagtatcacttctaccccaaccatcaaatgtcatgtcgttactcattacctcgatgatcaatccgagcctgaggatagtcgctatgtgttttcctataccatcactattcataaccttggtcgaggtcaagcacaattacttaagcgccactggttgatcaccgatgccaatggtaaaaagctagtgattgatggtgatggtgttgtgggtaaacaacccattattcaagcaagtgatgactatacctacaccagtggtacaattattgataccccgcttggtgtgatgcaagggcattacattatggaagacggggacggtaatagctttaaagttgacattgccccttttcgtttggctgtgcctaacattatccactag

SEQ ID NO: 5163 - protein, 127 aa, Photobacterium sp. SKA34
MSITSTPTIKCHVVTHYLDDQSEPEDSRYVFSYTITIHNLGRGQAQLLKRHWLITDANGKKLVIDGDGVVGKQPIIQASDDYTYTSGTIIDTPLGVMQGHYIMEDGDGNSFKVDIAPFRLAVPNIIH

SEQ ID NO: 5164 - DNA, 387 bp, Neptuniibacter caesariensis
  CDS (1)..(387): transl_table=11
atggaaaaccttcagcttggtaacaatgtagatatcaatgtggaaacctcatatcaggctaagcagtccgatcctgagagtaaacgctttgtgttctcttatcgaattacgattaccaaccacaacgagacacccgtgcagcttcttaatcgtcattggctaattactgatggcaaccagcacatccaggaagtcaatggtgaaggcgtggtcggagagcagcccgttatcaaaccccaggacagctatacttacacaagcggcgctgtactcgcgaccagcgtaggcagcatgcaaggccattatgagatgtctactgaagatggcgagacgtttaaagcccctattcaagctttcacgcttgcacaacccaatgcaattcactaa

SEQ ID NO: 5165 - protein, 128 aa, Neptuniibacter caesariensis
MENLQLGNNVDINVETSYQAKQSDPESKRFVFSYRITITNHNETPVQLLNRHWLITDGNQHIQEVNGEGVVGEQPVIKPQDSYTYTSGAVLATSVGSMQGHYEMSTEDGETFKAPIQAFTLAQPNAIH

SEQ ID NO: 5166 - DNA, 384 bp, Photobacterium profundum 3TCK
  CDS (1)..(384): transl_table=11
ttgagcgcgaattcccccccaacaattaaatgcaatgtcgttactcattatattgaggaacaatctgaacctgacaatcagcgttatgttttctcatataccattacgattagaaacctaggaaaaggttctgccaaattactaagccgttattggctaataaccgatgcaaatgggaaacggctcgtgattgaaggtgaaggcgtggttggcgaccaaccagaaataaagatgaacgaagaatatacttataccagcggtacgatcattgaaacaccacttggtgtaatgcaaggtcactacgtcatggacactgaagatggtgagacctttaaagctgaagtatctccgtttaggttagcaatacccaatattctccattaa

SEQ ID NO: 5167 - protein, 127 aa, Photobacterium profundum 3TCK
MSANSPPTIKCNVVTHYIEEQSEPDNQRYVFSYTITIRNLGKGSAKLLSRYWLITDANGKRLVIEGEGVVGDQPEIKMNEEYTYTSGTIIETPLGVMQGHYVMDTEDGETFKAEVSPFRLAIPNILH

SEQ ID NO: 5168 - DNA, 375 bp, gamma proteobacterium HTCC2207
  CDS (1)..(375): transl_table=11
atgagcgtcgaagctatcaccgtaaaagtcaaaaccgaatatctgttgcaacagtcaaagcctgatcaggctcagtttgccttcgcctaccacatcaccatacacaatcagagcgacatcccagcgcaactactaggacgccactggataatcaccgatgccaatgaagctaagcaggaagttcgcggtgccggtgttgtcggcgagcaacctttgatcgccccgggacagtcctacaagtacagcagcggtgtgatgctcgacacacccatcggcactatgcagggctgctataagatgcgcgatgatgagggctgcgagtttgacgccaccatagagcccttcttactttcaacgccccacgccgtgaactaa

SEQ ID NO: 5169 - protein, 124 aa, gamma proteobacterium HTCC2207
MSVEAITVKVKTEYLLQQSKPDQAQFAFAYHITIHNQSDIPAQLLGRHWIITDANEAKQEVRGAGVVGEQPLIAPGQSYKYSSGVMLDTPIGTMQGCYKMRDDEGCEFDATIEPFLLSTPHAVN

SEQ ID NO: 5170 - DNA, 393 bp, Aurantimonas manganoxydans SI85-9A1
  CDS (1)..(393): transl_table=11
atgtatagggcgacgacgcacggcatcacggtcacggtgacaccgacctatctggaagaccagtcgatgccggacgacggacgctgggtctgggcatatacggtcgagatcgagaacggcagccggcaaacgacccgcctgcgatcacgatattggcacatcaccgacgccaccggtcacgtcgaggaagtcagcggccccggcgtcgtcggcgaggaaccgcagctcgcccccggcgacagcttcacctacacctccggctgcccgctgggcacgccgtccggcttcatgcgcggccattaccgcatgcagcaggaggatggcacgctgttccaggtggagatcccggccttctcgctcgacgtgccggcccgccagcgggtgctgaactag

SEQ ID NO: 5171 - protein, 130 aa, Aurantimonas manganoxydans SI85-9A1
MYRATTHGITVTVTPTYLEDQSMPDDGRWVWAYTVEIENGSRQTTRLRSRYWHITDATGHVEEVSGPGVVGEEPQLAPGDSFTYTSGCPLGTPSGFMRGHYRMQQEDGTLFQVEIPAFSLDVPARQRVLN

SEQ ID NO: 5172 - DNA, 384 bp, Vibrio angustum S14
  CDS (1)..(384): transl_table=11
gtgagtatcacttctaccccaaccatcaaatgtcatgtcgttactcattacctcgatgatcagtccgagcctgacgatagtcgctatgtgttttcctataccattaccattcataatcttggtcgtggtcaagcgcaattgcttaagcgtcactggttgatcaccgatgccaatggtaaaaaactagtgattgatggtgatggtgttgtgggtaaacaacccgttattcaagcaagtgatgactatacctacaccagtggtacaatcattgataccccgcttggtgtgatgcaagggcattacattatggaagacggggacggtaatagctttaaagttgacattgccccttttcgtttggctgtgcctaacattatccactag

SEQ ID NO: 5173 - protein, 127 aa, Vibrio angustum S14
MSITSTPTIKCHVVTHYLDDQSEPDDSRYVFSYTITIHNLGRGQAQLLKRHWLITDANGKKLVIDGDGVVGKQPVIQASDDYTYTSGTIIDTPLGVMQGHYIMEDGDGNSFKVDIAPFRLAVPNIIH

SEQ ID NO: 5174 - DNA, 381 bp, Vibrio alginolyticus 12G01
  CDS (1)..(381): transl_table=11
atggacgtcattcaaccttgcatcaaaattcaagttcacaccaaatacatcgaagaacagtccaacccagagctacaacgctacgttttcgcttatatcatcaccatcaaaaaccttagccagcaaaccgtacagttagtgagccgccgctggctaatcacagactcgaatggcaagcaaatgacggttgaaggtgacggagtggtaggccagcagccctttattccaagcaatgatgaatacacgtacagtagcggaaccgcgttagaaacccctgtcggcgttatgcaaggacactacaaaatgctggatgagaaagggcaagagttcatcaccgaaattgaaccatttcgcttggctgttccaaatgttttaaattag

SEQ ID NO: 5175 - protein, 126 aa, Vibrio alginolyticus 12G01
MDVIQPCIKIQVHTKYIEEQSNPELQRYVFAYIITIKNLSQQTVQLVSRRWLITDSNGKQMTVEGDGVVGQQPFIPSNDEYTYSSGTALETPVGVMQGHYKMLDEKGQEFITEIEPFRLAVPNVLN

SEQ ID NO: 5176 - DNA, 378 bp, Bermanella marisrubri
  CDS (1)..(378): transl_table=11
atggctaatccaaacgtccgagtcgatgtcatccctcgctacctcgttgaagaatccagtgacgagaaaaaacgttatgtatttagttacaccgtcaccattcacaacgagggtgagcgcactgcccaactattaagccgccattggattatcaccaacggcgaaaccttaaagacacaagaagttcgcggcgatggcgtcatcggtaagcaacccacaatattacccggtgaaagctacacctacaccagtggtaccgttatggaaacaccggtaggcaccatgcaaggtagttaccgcatgattgatgacgaagggatatacttcgatgtaccaattccagttttcactttagccgcaacccacagcgtgcactaa

SEQ ID NO: 5177 - protein, 125 aa, Bermanella marisrubri
MANPNVRVDVIPRYLVEESSDEKKRYVFSYTVTIHNEGERTAQLLSRHWIITNGETLKTQEVRGDGVIGKQPTILPGESYTYTSGTVMETPVGTMQGSYRMIDDEGIYFDVPIPVFTLAATHSVH

SEQ ID NO: 5178 - DNA, 396 bp, Fulvimarina pelagi HTCC2506
  CDS (1)..(396): transl_table=11
atgtatcagctcagaaccgacgacattcttgtatctgtgacaccgcattacctggccgaacaatccgagcctagcgaggggcgctatgtctgggcctatacgatctcgatcgagaaccttggcgaagagacggtgcaactgatcgatcgcttttggcggatcaccgatgcgaacggaaacgtacaggaggttgctgggcccggcgtcgtcggcgatcagccagtcatagcaccgggcgacagttacacctatacctccggctgcccgctgccgacgccttccggcatcatgcagggtcattacggtatgcgtgacagcgaggggcagcgcttcaaggtcgacgtgccggccttttcgctggacctgccgcaaaagggtcggcggacgctgaactga

SEQ ID NO: 5179 - protein, 131 aa, Fulvimarina pelagi HTCC2506
MYQLRTDDILVSVTPHYLAEQSEPSEGRYVWAYTISIENLGEETVQLIDRFWRITDANGNVQEVAGPGVVGDQPVIAPGDSYTYTSGCPLPTPSGIMQGHYGMRDSEGQRFKVDVPAFSLDLPQKGRRTLN

SEQ ID NO: 5180 - DNA, 387 bp, Rhodobacterales bacterium HTCC2255
  CDS (1)..(387): transl_table=11
atggcagatttagcattgactcatgatattaatatcaacgtgttcactaaatttctaggacaacaaggtgagttccctgatgtcagtttcgcatttgcttatcatgtgacaatgacaaatcaaggtgataatccacttcaattacgcaaccgttattggctcatcacagatggtaacggtgaacaacaagaagtcagtggagcgggtgtgattggcgaggaacctgtaattccccccagtgaatctttttcctatactagtggcgcgttactcaaaacaccggtgggcactatgcaaggtcactacgaatttgaagccaatgacggcactatgtataaagcgcctatcgacgttttctcattagccctcaacaccgctgttaactaa

SEQ ID NO: 5181 - protein, 128 aa, Rhodobacterales bacterium HTCC2255
MADLALTHDININVFTKFLGQQGEFPDVSFAFAYHVTMTNQGDNPLQLRNRYWLITDGNGEQQEVSGAGVIGEEPVIPPSESFSYTSGALLKTPVGTMQGHYEFEANDGTMYKAPIDVFSLALNTAVN

SEQ ID NO: 5182 - DNA, 384 bp, Mariprofundus ferrooxydans PV-1
  CDS (1)..(384): transl_table=11
atgaatccagtcagccaacagcccatcgatgtgacagtacaaagcgaatatgcagccgctcattccgatcctgcacatgatcgttatgtcttcatataccacattacgattcgtaaccatggggcacagccggttcagctgatctcgcggcactggttgatcagcgatgcaaacggtcatgtcgatgaggtgaacggggaaggtgttatcggtgagcagccggtgatcagaccgggcgatgcgtacgcttatagcagcttctctgttctggccacgccggtgggttgtatgcaaggcagttaccagatggtttctgcagatgacacggcgtttgatgcgccgattccaccctttacactggcttgtcccggtagcctgaattga

SEQ ID NO: 5183 - protein, 127 aa, Mariprofundus ferrooxydans PV-1
MNPVSQQPIDVTVQSEYAAAHSDPAHDRYVFIYHITIRNHGAQPVQLISRHWLISDANGHVDEVNGEGVIGEQPVIRPGDAYAYSSFSVLATPVGCMQGSYQMVSADDTAFDAPIPPFTLACPGSLN

SEQ ID NO: 5184 - DNA, 402 bp, Labrenzia aggregata IAM 12614
  CDS (1)..(402): transl_table=11
gtgtctggcagttacaccgccatcacccaagggatcgaagtctccgtcgagccgttttatctggacgatgaatcacgtccggaagagagcgagtatatctgggcgtatatggtggagatccacaacggtggcagcgagccggtgcaattgaagacgcggtactggcagatcaccgacgctctggggcgccaggaagaagtcagcggtgagggtgtcgtcggcgaacagccggtgatcgagcccggagagacctacgaatattcgtctcactgcccgctttcgaccgacagcggcataatggccggatcctattccatggaacgcccggacggctccgtgttcgatgtcgtcattccggcgttctcgctcgaccttccggacgcgatccacagcctcaattga

SEQ ID NO: 5185 - protein, 133 aa, Labrenzia aggregata IAM 12614
MSGSYTAITQGIEVSVEPFYLDDESRPEESEYIWAYMVEIHNGGSEPVQLKTRYWQITDALGRQEEVSGEGVVGEQPVIEPGETYEYSSHCPLSTDSGIMAGSYSMERPDGSVFDVVIPAFSLDLPDAIHSLN

SEQ ID NO: 5186 - DNA, 390 bp, Alteromonadales bacterium TW-7
  CDS (1)..(390): transl_table=11
atgacaaagagcagtaatattggatcacctgtaaaggtgtctgtagagacattttatgttgaaggtcaatcacagcctgaaatcgaaaagtacgtatttgcctactctgtaacaataaaaaatcatagtttatgtagtgctaagttattgcatcgttattggttaattacagacgcaaacggcaaagaagttgaagttgaaggcgaaggcgttgttggcgaaacccccacgattggcccaggtgagagttacaaatacaccagtggtgctatcctagatacacctgttggtacaatgcaaggccactacacgctacgcaacgagtttggtgcagagtttgaagcacctattaatgtatttcgtttagcttgccctaatattttgcattag

SEQ ID NO: 5187 - protein, 129 aa, Alteromonadales bacterium TW-7
MTKSSNIGSPVKVSVETFYVEGQSQPEIEKYVFAYSVTIKNHSLCSAKLLHRYWLITDANGKEVEVEGEGVVGETPTIGPGESYKYTSGAILDTPVGTMQGHYTLRNEFGAEFEAPINVFRLACPNILH

SEQ ID NO: 5188 - DNA, 381 bp, Vibrionales bacterium SWAT-3
  CDS (1)..(381): transl_table=11
atggatatatctacgccttgtatcaaatgccaggttcactctaagtacatagaagagcagtctgaacctacgaagaatcgttacgtcttcgcctacatcattactatcaaaaacctgagtaaaagtacggttcaactcatgtcacgtcgttggttaattaccgactctaacggtaaacaattgacgatagaaggcgatggtgtagttggtcagcagccgattatcgagtccaatgacgaatacacttacaccagtggtactgttatcgaaacacccgtgggtgtcatgcaaggtcactatgtcatgaccgatcataagggcgtcgactttattgccgaagtcgacccattcagactcgccattcctaatattcttaactaa

SEQ ID NO: 5189 - protein, 126 aa, Vibrionales bacterium SWAT-3
MDISTPCIKCQVHSKYIEEQSEPTKNRYVFAYIITIKNLSKSTVQLMSRRWLITDSNGKQLTIEGDGVVGQQPIIESNDEYTYTSGTVIETPVGVMQGHYVMTDHKGVDFIAEVDPFRLAIPNILN

SEQ ID NO: 5190 - DNA, 402 bp, Erythrobacter sp. SD-21
  CDS (1)..(402): transl_table=11
gtgatcaaggagcttttccagcatagcgccatgaccgatggcatcaccgtgcgggtcgcggtgaacttcctgcccgagcaatcccagcccgaggcggacaaatggttctgggtctatcacatccgtatcgagaacgcctcgcacgaacgcgtccagctgatgacccgccactggcgcatcaccgacggggcgggattggtcgcgcatgtcgatggggacggtgtcgtgggcgaacaaccggtgctgcggccgggcgatagtcacgattacgtgtcgggttgtccgctcgacacgccgcacgggtcgatggaaggtttctacaccttccatcgcgaggatgggacgcccttcgaagtgcgtattcccttcttcccgcttgccgcacccgcgactgcgggctga

SEQ ID NO: 5191 - protein, 133 aa, Erythrobacter sp. SD-21
MIKELFQHSAMTDGITVRVAVNFLPEQSQPEADKWFWVYHIRIENASHERVQLMTRHWRITDGAGLVAHVDGDGVVGEQPVLRPGDSHDYVSGCPLDTPHGSMEGFYTFHREDGTPFEVRIPFFPLAAPATAG

SEQ ID NO: 5192 - DNA, 381 bp, Vibrio shilonii AK1
  CDS (1)..(381): transl_table=11
atggatacaacttcgccatgcgtgaaatgccaagtacataccaaatacgttgaagagcaatctgacccagacaataagcgctttgtctttgcttacgtcatcacgataaaaaacctaagtcagcaaactgtgcaattaatgagtcgacgttggctgattactgatgctaacggaaaacagatcagtgtcgagggtgaaggtgtgatcggccaacaaccaataatcgaaaaaagtgatgagtacacgtataccagtggcacggctattgagacacctgttggcgtgatgcaaggtcattacataatgatcgatgccaacggcaaagaattcattaccgaaatagagccattccgcttagctattcccaatattctaaattaa

SEQ ID NO: 5193 - protein, 126 aa, Vibrio shilonii AK1
MDTTSPCVKCQVHTKYVEEQSDPDNKRFVFAYVITIKNLSQQTVQLMSRRWLITDANGKQISVEGEGVIGQQPIIEKSDEYTYTSGTAIETPVGVMQGHYIMIDANGKEFITEIEPFRLAIPNILN

SEQ ID NO: 5194 - DNA, 393 bp, Plesiocystis pacifica SIR-1
  CDS (1)..(393): transl_table=11
atgtccgagcaatctggaacggtcacacgaggcgtccgcgtccgggttctggcgcgctacatcaaagagcgctccaaccccgaggacgggctgtggttcttcgcctaccgcgtcgagatcgccaacgtcggcgagtccaaggtccagctgatcagccggcactggatcatcaccgacggcgacggccacgtcgaagaagtccgggggcccggcgtggtcggggagcaaccgctgctcgcgcccggtcagagcttcgagtacacctcggcctgcccgctgccgacgccctttgggaccatgcacggcagctatcagatgatcgacgaagagggcgagcgctttgacgcgaccatcgctcccttcgcgctcagcttgccgaacttgattaactga

SEQ ID NO: 5195 - protein, 130 aa, Plesiocystis pacifica SIR-1
MSEQSGTVTRGVRVRVLARYIKERSNPEDGLWFFAYRVEIANVGESKVQLISRHWIITDGDGHVEEVRGPGVVGEQPLLAPGQSFEYTSACPLPTPFGTMHGSYQMIDEEGERFDATIAPFALSLPNLIN

SEQ ID NO: 5196 - DNA, 381 bp, Vibrio harveyi HY01
  CDS (1)..(381): transl_table=11
atggacgtcattcaaccctgcatcaaaattcaagttcataccaaatacattgaagaacagtccaaccctgaactgcaacgctacgtttttgcttacgtcattacgataaaaaacctcagccaacaaaccgtgcaattaatcagccgccgctggttgattaccgactccaatggcaagcaaatgaccgtagaaggcgaaggtgtcgtcggtcagcaaccttttatttccggtagcgacgaatacacctacagtagtggcaccgcacttgaaacgccggttggagtaatgcaaggacactacattctgctggatgaaaagggcaatgaatttatcaccgagatcgacccattccgtttggcaataccaaacgtgttaaattaa

SEQ ID NO: 5197 - protein, 126 aa, Vibrio harveyi HY01
MDVIQPCIKIQVHTKYIEEQSNPELQRYVFAYVITIKNLSQQTVQLISRRWLITDSNGKQMTVEGEGVVGQQPFISGSDEYTYSSGTALETPVGVMQGHYILLDEKGNEFITEIDPFRLAIPNVLN

SEQ ID NO: 5198 - DNA, 381 bp, Shewanella benthica KT99
  CDS (1)..(381): transl_table=11
atgtctaagctcgggtcgaccatcaaggttgaagtcacaactgaatatattgaagagcaatcatctcccaaagaggagagatacctttttagatataccatcaccatcatcaacctgggacaagccgcggtcacattagaaagccgtcactggcatattaccgatgcaaatgaccataagagtgaagtccagggcgccggtgtcgttggtgaaaccccgagaatagagcctgacaccgcataccaatataccagtggtactgtgctggcaacaccgctaggtgtcatgcaaggcacatataccatggtgaccgatgaaggggaacagtttcaagcaacaattcatccatttagattatccgttccaggtttacttcactaa

SEQ ID NO: 5199 - protein, 126 aa, Shewanella benthica KT99
MSKLGSTIKVEVTTEYIEEQSSPKEERYLFRYTITIINLGQAAVTLESRHWHITDANDHKSEVQGAGVVGETPRIEPDTAYQYTSGTVLATPLGVMQGTYTMVTDEGEQFQATIHPFRLSVPGLLH

SEQ ID NO: 5200 - DNA, 381 bp, Vibrio campbellii AND4
  CDS (1)..(381): transl_table=11
atggacgtcattcaaccctgcatcaaaattcaagttcataccaaatatattgaagaacagtccaaccctgaactgcaacgctatgtttttgcttacgtcattacgataaaaaacctcagtcaacaaaccgtgcaattgatcagccgtcgctggttgattaccgactccaatggcaaacagatgaccgtagagggcgaaggtgtcgtcggtcggcagcctttcattcctggtagtgatgaatacacctacagtagcggtaccgccattgagaccccagttggagtcatgcaaggacactacactttgctggatgcaaagggcaacgaattcatcactgaaatcgacccgttccgtttggcgataccaaacgtcttaaattaa

SEQ ID NO: 5201 - protein, 126 aa, Vibrio campbellii AND4
MDVIQPCIKIQVHTKYIEEQSNPELQRYVFAYVITIKNLSQQTVQLISRRWLITDSNGKQMTVEGEGVVGRQPFIPGSDEYTYSSGTAIETPVGVMQGHYTLLDAKGNEFITEIDPFRLAIPNVLN

SEQ ID NO: 5202 - DNA, 384 bp, Xanthomonas oryzae pv. oryzicola BLS256
  CDS (1)..(384): transl_table=11
atgcacgatgatccgcgctatcgggtcgaggtcgaggtatcgcaccgcttccttgcccatcaatccaccccggacgagggccgctatgccttcgcctacagcatccgcatccagaatgcgggcaccgtgcctgcgcggttgatcgcgcgccattggcagatcaccgatggcaacggacgcaccgagcaggtagatggcgaaggcgtggtcggcgagcagcccaggctgcgcccgggcgaggcgttccattacacctccggcgtgctgctggagaccgagcagggacagatgcaaggccactacgacatggtggccgacgacggcaccgaatttatcgccccgatcgccgccttcgtgctgagcgtacccaggacgctgcactga

SEQ ID NO: 5203 - protein, 127 aa, Xanthomonas oryzae pv. oryzicola BLS256
MHDDPRYRVEVEVSHRFLAHQSTPDEGRYAFAYSIRIQNAGTVPARLIARHWQITDGNGRTEQVDGEGVVGEQPRLRPGEAFHYTSGVLLETEQGQMQGHYDMVADDGTEFIAPIAAFVLSVPRTLH

SEQ ID NO: 5204 - DNA, 378 bp, Providencia stuartii ATCC 25827
  CDS (1)..(378): transl_table=11
atgcttaacgaacctaatgttagcatccaagtacagagtgtctatatcgtcagccagtctcaacctgaaataggacgatatgtatttgcctataccatatctatccgtaacttaggccgagagccactacagttaatgagccgctattggctcattactaacagtgatggtcataaaactgaagttcaaggcgaaggcgttgtcggtgaacaaccaatcatccagcccggtgcggtataccgttataccagtggagcaatattagaaactcccatgggtacaatggaaggttattacgtcatgttaaacagccgaggagaacacattcatgtggatattcctccattccgccttgctttacctactttgattaattaa

SEQ ID NO: 5205 - protein, 125 aa, Providencia stuartii ATCC 25827
MLNEPNVSIQVQSVYIVSQSQPEIGRYVFAYTISIRNLGREPLQLMSRYWLITNSDGHKTEVQGEGVVGEQPIIQPGAVYRYTSGAILETPMGTMEGYYVMLNSRGEHIHVDIPPFRLALPTLIN

SEQ ID NO: 5206 - DNA, 378 bp, Enterobacter cancerogenus ATCC 35316
  CDS (1)..(378): transl_table=11
atgattgattcgccccgcgtatgtgttcatgtacaaagcgtctacattgagtcccagtccacgccggatgatgaccgttttgtctttgcgtacaccgtaaccattcgcaatctggggcggatgcctgtgcaactgcgtgggcgttactggcttatcaccaacggcaatggccgtgaaacagaagtccagggggaaggtgtggtcggtgaacagccgcacatcgcccctggcgaagagtatcaatacaccagcggtgcagtcattgaaacgccgatgggtaccatgcagggccattatgaaatggtcgatgccgacggcaacgcattccgcgttgctattcctgtgttccgtctcgccgtaaccacactcattcattaa

SEQ ID NO: 5207 - protein, 125 aa, Enterobacter cancerogenus ATCC 35316
MIDSPRVCVHVQSVYIESQSTPDDDRFVFAYTVTIRNLGRMPVQLRGRYWLITNGNGRETEVQGEGVVGEQPHIAPGEEYQYTSGAVIETPMGTMQGHYEMVDADGNAFRVAIPVFRLAVTTLIH

SEQ ID NO: 5208 - DNA, 375 bp, Oxalobacter formigenes HOxBLS
  CDS (1)..(375): transl_table=11
atgagttctcaagcattggatgtctcggttaccacgagatacatagatgatcagtctgcacctgaccggggcagttacgtctttacgtactccgtgacgatcaaaaatacagggcaagtaggcgcccagctgatcgcccgtcactggatcattacggacgccaacaaccatgtggaggaaattcgcggactgggcgttgtgggccggcagcccttgttgaagcccggggaagaattcgaatataccagcggtacggcactgtcaactccgcagggatcaatgcagggagaatttttgtgcgtgacggaaaaaggagaacagtttcaggtgaaaatccccgaattcgtgctgtctttgccgagaacacttcactaa

SEQ ID NO: 5209 - protein, 124 aa, Oxalobacter formigenes HOxBLS
MSSQALDVSVTTRYIDDQSAPDRGSYVFTYSVTIKNTGQVGAQLIARHWIITDANNHVEEIRGLGVVGRQPLLKPGEEFEYTSGTALSTPQGSMQGEFLCVTEKGEQFQVKIPEFVLSLPRTLH

SEQ ID NO: 5210 - DNA, 375 bp, Oxalobacter formigenes OXCC13
  CDS (1)..(375): transl_table=11
atgagtcctgatttactcgatgtctccgtgacgacaagatatatagacgatcagtccgcccctgatcgggacagttacgtatttacctattcggtgacaatcaaaaataaagggcaggtcggcgcgcaattgattgcacgccactggatcattacggatgccaataaccatgttgaggaaattcgcggtctgggtgtggttggtcgccagccattgttaaagcccggagaggaatttgaatataccagcggcacatctctggcgactccacagggatcgatgcagggagagtttttgtgtgtaacggaacagggagaacagttcagtgtggaaattccggaatttttgctgtctttgccaagaacgcttcactga

SEQ ID NO: 5211 - protein, 124 aa, Oxalobacter formigenes OXCC13
MSPDLLDVSVTTRYIDDQSAPDRDSYVFTYSVTIKNKGQVGAQLIARHWIITDANNHVEEIRGLGVVGRQPLLKPGEEFEYTSGTSLATPQGSMQGEFLCVTEQGEQFSVEIPEFLLSLPRTLH

SEQ ID NO: 5212 - DNA, 672 bp, Vitis vinifera
  CDS (1)..(672)
  misc_feature (132)..(132): r is g or a
atgtgggcccttagcccgagttcgtttctttctcgcagtcaaacttacgctcttctgaagcagcaactgcaggttgctgcaaaatctgaggattacaaagaagctgctagactacgcgattcattgagattrtttgaggaagaggagccggttttgcgtcttcgcagattgattaaagaggcagtcgccgatgagaggtttgaggatgcagctagataccgtgatgagcttaaggaaattgcaccgcattctctcttaaaatgttcaagtgacgcaacaaccgtggggatcagggttcaagttagaagtgtgtacattgaaggtcgaagtcagccttcaaaagggcagttcttttttgcgtatagaataagaattaccaataactcagaccgccctgttcaacttctcagaaggcattggattataacagatgcaaatggaaaaattgagcatgtctgggggattggtgtcataggtgaacagccagttatacttcctagaaccggttttgagtactcatctgcatgcccattaagcactccaaatggaagaatggagggtgactttgaaatgaaacatattgacaaagtgggttctcagactttcaatgtggcaattgccccattttctctctccacactcggagatgagtctgatacatttgagatgtga

SEQ ID NO: 5213 - protein, 223 aa, Vitis vinifera
MWALSPSSFLSRSQTYALLKQQLQVAAKSEDYKEAARLRDSLRLFEEEEPVLRLRRLIKEAVADERFEDAARYRDELKEIAPHSLLKCSSDATTVGIRVQVRSVYIEGRSQPSKGQFFFAYRIRITNNSDRPVQLLRRHWIITDANGKIEHVWGIGVIGEQPVILPRTGFEYSSACPLSTPNGRMEGDFEMKHIDKVGSQTFNVAIAPFSLSTLGDESDTFEM

SEQ ID NO: 5214 - DNA, 873 bp, Zea mays
  CDS (1)..(873)
atgcagtgggcgggtctgagatcgcaggcgccggttcccacggcggcgtggacggggccgaggccaagaaccgcgaggtgcccgcagggtagattccccacagcgcgccgggcgctggtggcgtcggcagcggcctcggacgctaattcgagctcgaattcgccggggaaggacgaggagggggaggaggtggtgcgaagggagaaggaggagaaggcggtcgcgtcgcttctgatgagaagccagaagtacgccatgctaaagcagcagctcgccgtggccgcccaatttgaggattacaaggaagcagcgaggttgagggactcgctgaggtccttcgaggagaaggagcctgtgttgtgcctccgccggttgatgaagaaggccattgaggaggagaggtttgaggatgctgctaaatacagagatgaattaaagattttggctccacactccctcctcaaatgttctagtgatgcaactagtttggggataagagttcaagtcaggagcgtctatattgaaagccggagccagccattgaaagggcaattcttttttgcttatagaattagaattacgaatagttctcagcgccctgttcagcttctcaaaaggcactggattgttacagatggaaatggaaggacagaaaacatttggggagttggagtagtgggagaacaacctgtcatattcccgaagactggttttgagtactcttctgcatgcccattgagcactccaaatgggagaatggaaggtgactttgagatgaagcacatcgacaaggctggatcatcaacattcaatgttgcaattgcgccattctctctgtcaattcttggtgacgataatgatgttctgctatga

SEQ ID NO: 5215 - protein, 290 aa, Zea mays
MQWAGLRSQAPVPTAAWTGPRPRTARCPQGRFPTARRALVASAAASDANSSSNSPGKDEEGEEVVRREKEEKAVASLLMRSQKYAMLKQQLAVAAQFEDYKEAARLRDSLRSFEEKEPVLCLRRLMKKAIEEERFEDAAKYRDELKILAPHSLLKCSSDATSLGIRVQVRSVYIESRSQPLKGQFFFAYRIRITNSSQRPVQLLKRHWIVTDGNGRTENIWGVGVVGEQPVIFPKTGFEYSSACPLSTPNGRMEGDFEMKHIDKAGSSTFNVAIAPFSLSILGDDNDVLL

SEQ ID NO: 5216 - DNA, 378 bp, Providencia rustigianii DSM 4541
  CDS (1)..(378): transl_table=11
atgctgaatgatcccaatgtgagcatccaagttcaaagtgtctacatagaaagccagtcacaacctgaaatcgcccgctatgtatttgcttataccatttgcatccgtaatttagggcgaattcccatacaattaatgagccgttattggctcattaccaacagtgatggtcataaaactgaagttcaaggtgaaggtgttgtaggtgaaaaacctgtcattttaccgggaactgaatatcgatataccagtggggcaattttagaaacgccaatgggtacgatggaaggctattacgttatgcttagcgatcaaggggtcaactttcatgttgatatccccgcttttcgactcgctataccaacgctgattaattaa

SEQ ID NO: 5217 - protein, 125 aa, Providencia rustigianii DSM 4541
MLNDPNVSIQVQSVYIESQSQPEIARYVFAYTICIRNLGRIPIQLMSRYWLITNSDGHKTEVQGEGVVGEKPVILPGTEYRYTSGAILETPMGTMEGYYVMLSDQGVNFHVDIPAFRLAIPTLIN

SEQ ID NO: 5218 - DNA, 378 bp, Providencia alcalifaciens DSM 30120
  CDS (1)..(378): transl_table=11
atgctgaatgatcccaatgtgagcatccaagttcaaagtgtctacatagaaagccaatcccaacctgagatcgcccgtttcgtctttgcgtataccatttgtatccgtaatgtagggcgagtcccgatacagttaatgagccggtattggctcattaccaatagtgatggtcgtaaaactgaagtgcaaggtgaaggcgtggttggcgaacaacccgtgattttaccgggcaaggaatatcgctataccagcggtgcaatattagaaacaccaatgggtacgatggaaggctattacgtcatgctgagcgaccaaggaaatcacttccatgttgatattcctgcatttcgtctcgccatcccaacactgattaattga

SEQ ID NO: 5219 - protein, 125 aa, Providencia alcalifaciens DSM 30120
MLNDPNVSIQVQSVYIESQSQPEIARFVFAYTICIRNVGRVPIQLMSRYWLITNSDGRKTEVQGEGVVGEQPVILPGKEYRYTSGAILETPMGTMEGYYVMLSDQGNHFHVDIPAFRLAIPTLIN

SEQ ID NO: 5220 - DNA, 402 bp, Comamonas testosteroni KF-1
  CDS (1)..(402): transl_table=11
atgaatgagtttctggtccaagtccagcccgcctacctgcccgagcaatccgccccggccgccggcgtctatgtgttttcgtacaccattaccgtcaccaacacgggtgaggtgccggcgcagctgattgcgcggcactggatcatcaccaacgagctgggccatgtcgaagaggtcaaaggcctgggcgtggtgggccggcagccgttgctgcagcctggtgagtccttcgagtacagcagcggctgccagctgcgtacgcccacgggcaccatgcggggaagctatctctgcgtgaatcacgagggcgagaccttcgaatgcgagattccactcttcgtattgcagatgaacgagtccggcgaccccatgcccatgcccgagaagcgcgttctgcactga

SEQ ID NO: 5221 - protein, 133 aa, Comamonas testosteroni KF-1
MNEFLVQVQPAYLPEQSAPAAGVYVFSYTITVTNTGEVPAQLIARHWIITNELGHVEEVKGLGVVGRQPLLQPGESFEYSSGCQLRTPTGTMRGSYLCVNHEGETFECEIPLFVLQMNESGDPMPMPEKRVLH

SEQ ID NO: 5222 - DNA, 903 bp, Oryza sativa subsp. japonica
  CDS (1)..(903)
atgcagtgggcggcgcttagcttgccgccggcaccggcggcgccggcggcggtgtggatggggcggagggcaagaaccgcgaggttgccgtcgccggggccgcgccgggtggtgctggccgccgcggcgtcgtcgtcgtcgccgtcgccggatgcgaactcgagctcgaactcgaactcgccggggagtggtggcggcggcgaggaggtggaggaggagagggaggacgcggcgcggatggagaaggcggcggccttcctgatgcggagccagaagtacgccatgctcaagcagcagctcgccgtggccgcccagttcgaggattacaaggaggcggcgaggctgagggattcgctcaagtcattcgaggaggaggagccagttcttcgtctccgccgatcgctcaagaaggcggttgaggaggagaggttcgaggatgctgctaagtacagagatgaactgaagattttggctccacacgccctcctaaaatgttctagtgatgctactaccctggggattagagttcaagtcaggagtgtttatattgaaagccggagccagcctttgaagggccagttcttctttgcctacagaatcagaatcacaaataattctcagcgccctgttcagcttctcagaagacattggattgtcactgatgcaaatggaaggacggagaacatttggggtgtaggtgttgtgggagagcaacctgtcatatttccaaggactggttttgagtactcatctgcatgcccattaaacacaccaaatgggagaatggaaggtgattttgagatgaagcacatcgacaaagctgggtcgtctacattcaatgtcgcaattgcaccattctctctgtcaatccttggagatgacaacgatgatgttctcctctaa

SEQ ID NO: 5223 - protein, 300 aa, Oryza sativa subsp. japonica
MQWAALSLPPAPAAPAAVWMGRRARTARLPSPGPRRVVLAAAASSSSPSPDANSSSNSNSPGSGGGGEEVEEEREDAARMEKAAAFLMRSQKYAMLKQQLAVAAQFEDYKEAARLRDSLKSFEEEEPVLRLRRSLKKAVEEERFEDAAKYRDELKILAPHALLKCSSDATTLGIRVQVRSVYIESRSQPLKGQFFFAYRIRITNNSQRPVQLLRRHWIVTDANGRTENIWGVGVVGEQPVIFPRTGFEYSSACPLNTPNGRMEGDFEMKHIDKAGSSTFNVAIAPFSLSILGDDNDDVLL

SEQ ID NO: 5224 - DNA, 873 bp, Ricinus communis
  CDS (1)..(873)
atgcattcgttggcgtccagtagtattaaagtgtttacagatttcaatacgggcaggaggacttgttttccggttcggagctccggtttcgatagaagaatacaacaacaccaacagttggtgatcaatcttggagtttctccttcttattttaggaattttagtaataataatagtaatagttgtcggatcgtagcatgttccgttgagagaaacgggaatggcggaagtggagcaagttcgagttcaagttccggctcgggttcggattataattcgagttcctttgcgtctcggactcaaacttacgctttcttgaaacagcaaatggaagttgctgcccaatctgaggactatgaagaagctgcaagaattcgtgactcattgagatcttttgaagaagaggaaccggatgcagtcagatatcgcgacgaactaaaggaaattgcaccacattctctcttgaaatgttcaagtgatgccacaaccttggggatcagggtccaagttaggagtgtatacattgacgggcgaagtcagccttcaaaggggcagtacttctttgcatacagaataagaatcaccaataactcagatcgtcctgttcaacttcttagaagacattggattatctctgatgccaatggaagagctgaaaatgtttggggaattggagttataggtgaacagccagttatacttcctaggacaggatttgaatactcatctgcttgcccattatctacacccagtggcagaatggaaggtgactttgaaatgaaacatattgatagagtaggatcatcgactttcaacgtggctattgcaccattttctctatcaatactagcagatgaaagtgacactttttga

SEQ ID NO: 5225 - protein, 290 aa, Ricinus communis
MHSLASSSIKVFTDFNTGRRTCFPVRSSGFDRRIQQHQQLVINLGVSPSYFRNFSNNNSNSCRIVACSVERNGNGGSGASSSSSSGSGSDYNSSSFASRTQTYAFLKQQMEVAAQSEDYEEAARIRDSLRSFEEEEPDAVRYRDELKEIAPHSLLKCSSDATTLGIRVQVRSVYIDGRSQPSKGQYFFAYRIRITNNSDRPVQLLRRHWIISDANGRAENVWGIGVIGEQPVILPRTGFEYSSACPLSTPSGRMEGDFEMKHIDRVGSSTFNVAIAPFSLSILADESDTF

SEQ ID NO: 5226 - DNA, 393 bp, Thioalkalivibrio sp. K90mix
  CDS (1)..(393): transl_table=11
atgaattcgccccgcgaaaccgaagaacacgccatcgagatcgaggtcgccacggcctatgtcgaggaccagtcggagcccgatgacgaccgctacgtgttcgcctaccacatcacgatccgcaactccggtgcgctgaccgtgcaactgctgaaccgccactggatcatccgcgatggccgcgaccagacgcaggaggtgcgcggcgaaggcgtagtgggcgagcagccacgcatcgagcccggtgacagcttcgagtacaccagcggcacggtgatcgagacgccggtcggcaccatggagggcagctacggcatgcaggacgaacgcggcaacaccttcgaggcgccgatcccgcccttcaccctctccgtaccccgcacgctgcactag

SEQ ID NO: 5227 - protein, 130 aa, Thioalkalivibrio sp. K90mix
MNSPRETEEHAIEIEVATAYVEDQSEPDDDRYVFAYHITIRNSGALTVQLLNRHWIIRDGRDQTQEVRGEGVVGEQPRIEPGDSFEYTSGTVIETPVGTMEGSYGMQDERGNTFEAPIPPFTLSVPRTLH

SEQ ID NO: 5228 - DNA, 378 bp, Proteus penneri ATCC 35198
  CDS (1)..(378): transl_table=11
atgttcacctcatcaaaagtggcgatacaggtacaaagcgtttacattgaaagccaatcatctcctgaagatgaacgatatgtttttgcttataccatatcaattcataatttgaataaatgtgcaattcgcctcctgcgccgctattggttaatcaccaatgcacaaggtaataccactgaagttcgaggtgaaggtgttgtcggcgaacagccccttatcgagccaggcacacaataccgctataccagtggagccgttcttgaaacaccaatgggaacaatggaaggtcattatgaaatgattgacactgatggtcgattatttcaaatcgagatccctgttttccgccttgcactcccaacattgataaactaa

SEQ ID NO: 5229 - protein, 125 aa, Proteus penneri ATCC 35198
MFTSSKVAIQVQSVYIESQSSPEDERYVFAYTISIHNLNKCAIRLLRRYWLITNAQGNTTEVRGEGVVGEQPLIEPGTQYRYTSGAVLETPMGTMEGHYEMIDTDGRLFQIEIPVFRLALPTLIN

SEQ ID NO: 5230 - DNA, 429 bp, Halothiobacillus neapolitanus c2
  CDS (1)..(429): transl_table=11
atgatattcatggaccaaatctcagatcatccgcgagaaaacgatgccaatgatgcatccatcgaaattcaagttaaaacgacattcgtaccggagcattccgactccaaattgaatcgctttgccttcgggtacgaaattcacatcgcaaaccggggattacataccgtccagctcatggatcgacactggcagatcgacatgggcaacggctgcatccaggaagtacggggagaaggcgtcgtcggtgagcagccggttctggcacctggcgaatcctatcaatatcaatccggggctatcatcgaaacacccgccgggcgcatgtggggcgattacggtttcgtgactgaaaacggagaaagattccgggctccgatccccctgttccatcttttggcccccgatcaattccgccctattcactga

SEQ ID NO: 5231 - protein, 142 aa, Halothiobacillus neapolitanus c2
MIFMDQISDHPRENDANDASIEIQVKTTFVPEHSDSKLNRFAFGYEIHIANRGLHTVQLMDRHWQIDMGNGCIQEVRGEGVVGEQPVLAPGESYQYQSGAIIETPAGRMWGDYGFVTENGERFRAPIPLFHLLAPDQFRPIH

SEQ ID NO: 5232 - DNA, 393 bp, Bradyrhizobium japonicum
  CDS (1)..(393): transl_table=11
atgtaccgcgccgtgacccgccagatcgaagtgaccgtcgagccgaactttgttccggaacagtcgtcggccgaccgctcccgctacttctggtcctacaccatcgtcatcaccaattcgggcgaggagaccgtgcagctcaagacgcggcactggatcatcaccgacgccaccggccgccagcaggaggtgaagggcgagggcgtggtcggcgagcagccgaccctggcccccggcgagcgcttcgaatacacctccggcgtgccgctctcgaccgcctccggcttcatgaccggccgctaccagatggtcagcgaaagcggcgaacgcttcgagatcgacgtgccgacgttttcgctggatagcccggacaacaagcgggtgttgaactag

SEQ ID NO: 5233 - protein, 130 aa, Bradyrhizobium japonicum
MYRAVTRQIEVTVEPNFVPEQSSADRSRYFWSYTIVITNSGEETVQLKTRHWIITDATGRQQEVKGEGVVGEQPTLAPGERFEYTSGVPLSTASGFMTGRYQMVSESGERFEIDVPTFSLDSPDNKRVLN

SEQ ID NO: 5234 - DNA, 444 bp, Hordeum vulgare
  CDS (1)..(444)
atgattttggctccgcactccctcctcaaatgttctagtgatgctacaactctggggataagggtacaagtcaggagtgtctatattgaaagccggagccaacccttaaaggggaaattcttttttgcctacagaatcagaattacaaataattctcaacgtgctgtacagcttctcagacgacactggattgtcaccgatgcgaatggaaggacagagaatgtttggggtgttggtgtagtgggagagcaacctgtaatattcccaaagactggttttgagtactcatctgcatgcccactaaacacgccaaatgggagaatggaaggagattttgagatgaagcacattgacaaggttggatcctcaacattcaatatcgccatcgcaccattctctctgtcaatcctcggggacgacaatgacgctcccctcagaaggtga

SEQ ID NO: 5235 - protein, 147 aa, Hordeum vulgare
MILAPHSLLKCSSDATTLGIRVQVRSVYIESRSQPLKGKFFFAYRIRITNNSQRAVQLLRRHWIVTDANGRTENVWGVGVVGEQPVIFPKTGFEYSSACPLNTPNGRMEGDFEMKHIDKVGSSTFNIAIAPFSLSILGDDNDAPLRR

SEQ ID NO: 5236 - DNA, 23 bp, Artificial sequence
  primer
atgatcaattcgccccgagtgtg

SEQ ID NO: 5237 - DNA, 24 bp, Artificial sequence
  primer
ttaatgaatgagtgtgggaacggc

SEQ ID NO: 5238 - protein, 121 aa, Artificial sequence
  consensus sequence
  Variant (2)..(4): Xaa in position 2 to 4 is any amino acid
  Variant (6)..(9): Xaa in position 6 to 9 is any amino acid
  Variant (11)..(11): Xaa in position 11 is any amino acid
  Variant (13)..(14): Xaa in position 13 to 14 is any amino acid
  Variant (15)..(18): Xaa in position 15 to 18 is any or no amino acid
  Variant (20)..(20): Xaa in position 20 is any amino acid
  Variant (22)..(24): Xaa in position 22 to 24 is any amino acid
  Variant (26)..(26): Xaa in position 26 is any amino acid
  Variant (28)..(34): Xaa in position 28 to 34 is any amino acid
  Variant (36)..(37): Xaa in position 36 to 37 is any amino acid
  Variant (39)..(39): Xaa in position 39 is any amino acid
  Variant (41)..(41): Xaa in position 41 is any amino acid
  Variant (45)..(46): Xaa in position 45 to 46 is any amino acid
  Variant (48)..(51): Xaa in position 48 to 51 is any amino acid
  Variant (52)..(52): Xaa in position 52 is any or no amino acid
  Variant (54)..(54): Xaa in position 54 is any amino acid
  Variant (56)..(56): Xaa in position 56 is any amino acid
  Variant (61)..(61): Xaa in position 61 is any amino acid
  Variant (64)..(66): Xaa in position 64 to 66 is any amino acid
  Variant (68)..(72): Xaa in position 68 to 72 is any amino acid
  Variant (74)..(74): Xaa in position 74 is any amino acid
  Variant (77)..(80): Xaa in position 77 to 80 is any amino acid
  Variant (82)..(83): Xaa in position 82 to 83 is any amino acid
  Variant (85)..(85): Xaa in position 85 is any amino acid
  Variant (87)..(87): Xaa in position 87 is any amino acid
  Variant (89)..(89): Xaa in position 89 is any amino acid
  Variant (91)..(96): Xaa in position 91 to 96 is any amino acid
  Variant (97)..(105): Xaa in position 97 to 105 is any or no amino acid
  Variant (107)..(107): Xaa in position 107 is any amino acid
  Variant (108)..(108): Xaa in position 108 is any or no amino acid
  Variant (110)..(112): Xaa in position 110 to 112 is any amino acid
  Variant (114)..(115): Xaa in position 114 to 115 is any amino acid
  Variant (117)..(117): Xaa in position 117 is any amino acid
  Variant (119)..(120): Xaa in position 119 to 120 is any amino acid
VXXXYXXXXSXPXXXXXXFXYXXXIXNXXXXXXXLXXRXWXITDXXGXXXXXVXGXGVVGXQPXXXPXXXXXYXSGXXXXTXXGXMXGXYXXXXXXXXXXXXXXXGXXFXXXIXXFXLXXP

SEQ ID NO: 5239 - protein, 36 aa, Artificial sequence
  protein pattern
  Variant (2)..(2): Xaa in position 2 is any amino acid
  Variant (5)..(5): Xaa in position 5 is Ile or Val
  Variant (7)..(7): Xaa in position 7 is any amino acid
  Variant (10)..(10): Xaa in position 10 is any amino acid
  Variant (11)..(11): Xaa in position 11 is Ile or Leu
  Variant (12)..(16): Xaa in position 12 to 16 is any amino acid
  Variant (17)..(17): Xaa in position 17 is Phe, His or Tyr
  Variant (18)..(18): Xaa in position 18 is any amino acid
  Variant (20)..(20): Xaa in position 20 is any amino acid
  Variant (22)..(22): Xaa in position 22 is any amino acid
  Variant (23)..(23): Xaa in position 23 is Ala, Cys, Ser, Thr or Val
  Variant (24)..(24): Xaa in position 24 is any amino acid
  Variant (25)..(25): Xaa in position 25 is Ile, Leu or Met
  Variant (26)..(26): Xaa in position 26 is any amino acid
  Variant (28)..(29): Xaa in position 28 to 29 is any amino acid
  Variant (31)..(31): Xaa in position 31 is any amino acid
  Variant (33)..(33): Xaa in position 33 is any amino acid
  Variant (35)..(35): Xaa in position 35 is any amino acid
  Variant (36)..(36): Xaa in position 36 is Phe or Tyr
GXGVXGXQPXXXXXXXXXYXSXXXXXTXXGXMXGXX

SEQ ID NO: 5240 - protein, 26 aa, Artificial sequence
  protein pattern
  Variant (2)..(2): Xaa in position 2 is any amino acid
  Variant (3)..(3): Xaa in position 3 is Ile or Val
  Variant (4)..(4): Xaa in position 4 is any amino acid
  Variant (5)..(5): Xaa in position 5 is Ile, Met or Val
  Variant (6)..(6): Xaa in position 6 is any amino acid
  Variant (8)..(8): Xaa in position 8 is any amino acid
  Variant (9)..(9): Xaa in position 9 is Ala, Gly, Asn or Ser
  Variant (10)..(14): Xaa in position 10 to 14 is any amino acid
  Variant (16)..(17): Xaa in position 16 to 17 is any amino acid
  Variant (19)..(19): Xaa in position 19 is any amino acid
  Variant (21)..(21): Xaa in position 21 is any or no amino acid
  Variant (23)..(23): Xaa in position 23 is any or no amino acid
  Variant (25)..(25): Xaa in position 25 is Asp, Gly, Asn or Ser
  Variant (26)..(26): Xaa in position 26 is Ala, Glu, Gly, Gln or Ser
YXXXXXNXXXXXXXLXXRXWXIXTXX

SEQ ID NO: 5241 - DNA, 537 bp, Glycine max
  CDS (1)..(537)
atggaaccgcgttcggttcggcgaatcgtcgtcttcgtaaccataaccgtcttctccctcgcactccttgccgttttgacaggttttggtggtggtgggactctcaccgtagccatggcggtgtccgtgacgcgtggttcggagaaaggaaccgtcgctagttcgcatcgcaaacttcttactagtgacaatggaaatgaaagagtggaaccgaaccgaatatggggtgagaaatgcagcaagtctgatatagtgatcaaccaaggccccacagcacctcttccaagtggcattccaacctacacagtagagataatgaatatgtgtgtcagtggttgcgacatctctaaaatacacctcagatgcggctggttcagctctgcacgcctcatcaaccccaagctcttcaagcgcctccgttacaacgactgtctcgtcaatgatggcaggcccttgatcaacggtgccaccatttccttccaatatgccaacaccttcctctaccctctctcagtttcctctgttgtctgtgtatga

SEQ ID NO: 5242 - protein, 178 aa, Glycine max
MEPRSVRRIVVFVTITVFSLALLAVLTGFGGGGTLTVAMAVSVTRGSEKGTVASSHRKLLTSDNGNERVEPNRIWGEKCSKSDIVINQGPTAPLPSGIPTYTVEIMNMCVSGCDISKIHLRCGWFSSARLINPKLFKRLRYNDCLVNDGRPLINGATISFQYANTFLYPLSVSSVVCV

SEQ ID NO: 5243 - DNA, 774 bp, Zea mays
  CDS (41)..(550)
cacgtacgtacgtgtgagggctgagggctgctcggcggccatgggacaatggtgctttaagaaacgcgcagctctggtgattattgtggccattagctcgctgcagctgctcctgataactgctcaagaagctggaggagaccacgaggtgtggtcgtcgtcatcctcgccggccggtggtcgtggtggcggcgccgtcgtcgtcccgacggcgcggatggggccggacgggtcgtcgacgtcgtgttcgggggaggaggcggtggtggtgtaccagagcagcgccaaccctctgcccagcggcatcccggcctacaccgtgcagatcatcaacgtctgcggcggagggtgcaccgtgtacgacgtgcacgtctcctgcggcgacttcgcctccacggagctcgtcgacccggccaagttccagcgcgtcgccttcgacgactgcgtcgtcaagggcggcgccgccttggaacccagcgagaccgtctccttccagtactccaactccttctcctaccagctcagtgtcgcctccgtcgcgtgccactagagatcatcgaaccacaggaccactactactagatgatcatcgtcggtcgtcgttacgttgtgctgtactagtactactgctgttgttatgctaactagctagttccacgtacgttaattgttcagtctatctgcacttctgtttaatttctatcgtgtgtgtgtaactatatatttctacggtcgtcgtagttcggcatcaaactggaagtgatcaatcaaggg

SEQ ID NO: 5244 - protein, 169 aa, Zea mays
MGQWCFKKRAALVIIVAISSLQLLLITAQEAGGDHEVWSSSSSPAGGRGGGAVVVPTARMGPDGSSTSCSGEEAVVVYQSSANPLPSGIPAYTVQIINVCGGGCTVYDVHVSCGDFASTELVDPAKFQRVAFDDCVVKGGAALEPSETVSFQYSNSFSYQLSVASVACH

SEQ ID NO: 5245 - DNA, 510 bp, Oryza sativa
  CDS (1)..(510)
atggccgactgcactacgatgcgtttggcttcatctgtgaccatcatcttgctgctgctcgtagctagccaagctctagtagtctctggcgagtcatcttcctccgcgatgcagtccaagacgttgaacatgaacaagcttctcaacatcagtgaagatcactctcctaatggcggacgccactggatgcagcggatgcagccggacagctgctcggagcagaacgtggtggtgtaccagaacaacgcggagcacctccccagcggcatcccgacctacagcgtggaaatcatcaacgtctgcacggcgtgcacggtgtacgacgtccacatctcctgcggcgagtttgcctccgcggagctcgtcgaccccagccagttccagcgtatcggcttcaacgactgtctggtgaagggcggaggccggttgggtcctagcgaggccgtctccttccagtactccaactccttcgcctacccgctcgccgtagctaatgtcgcgtgtgagtag

SEQ ID NO: 5246 - protein, 169 aa, Oryza sativa
MADCTTMRLASSVTIILLLLVASQALVVSGESSSSAMQSKTLNMNKLLNISEDHSPNGGRHWMQRMQPDSCSEQNVVVYQNNAEHLPSGIPTYSVEIINVCTACTVYDVHISCGEFASAELVDPSQFQRIGFNDCLVKGGGRLGPSEAVSFQYSNSFAYPLAVANVACE

SEQ ID NO: 5247 - DNA, 561 bp, Glycine max
  CDS (1)..(561)
atggaagcgccttcggttcgacgaatcgctgtcgtcgtcttcgtaaccgtctccgtcttctccatcgcactcgttgccgttttgacagattttggcggcggcggcggtgggactctcaccgataccatggcggcggtgtccttgtcgcgtggtttggatgaagtaaccaacacgttcctccctaattcgcatcgcaaactccttaccagtggcaatggcaatgaaagagtggaaccaaaccgaatatggggcgagaagtgcagcaaaagtgatgtagtgataaaccagggccccacagcacctctcccaagtggcattccgacctacacagtagagataatgaacatgtgcgtgagtggatgcgacatctctggcatacacctcagatgcggctggttcagctctgcacgcctaatcaaccctaagctcttcaagcgcctccgttacaacgactgcctcgtcaatgatggcaggcccttgatcaacggtgccaccatttcattccagtatgccaacaccttcctctaccctctctcagtttcctctgttgtctgtgtatga

SEQ ID NO: 5248 - protein, 186 aa, Glycine max
MEAPSVRRIAVVVFVTVSVFSIALVAVLTDFGGGGGGTLTDTMAAVSLSRGLDEVTNTFLPNSHRKLLTSGNGNERVEPNRIWGEKCSKSDVVINQGPTAPLPSGIPTYTVEIMNMCVSGCDISGIHLRCGWFSSARLINPKLFKRLRYNDCLVNDGRPLINGATISFQYANTFLYPLSVSSVVCV

SEQ ID NO: 5249 - DNA, 540 bp, Arabidopsis thaliana
  CDS (1)..(540)
atgagaatggaacatatctacaaattccaacattggctcttcttcataggtcttggagtgttgctgtctctttctctgtctgtgaaggccaatgacttcgaaggttccaatgatagaagaagcattgctctcaaggctagaagcttcgtttccataaacgaaaaccgcaccgctctttccagaaagctactactctctcccgacattggcgatgggaccaacagaatcggacaagattgctcaaaagatgatattgttctctttcaaggctcaacaaatccacttcctagtggagttccttcatatacagttgagatcttcaactcttgtgtctcggattgcaatatagcagagatccacgtcagttgtggctggttcagctcagtcagactggttaaccctcgagttttcaggcgactcgactacgacgattgtctggttaacgatggtcaacctcttggtcctggacagtcactctcctttcaatatgctaacagcttctcttaccctctctctgttgcttcagtctcttgcttctga

SEQ ID NO: 5250 - protein, 179 aa, Arabidopsis thaliana
MRMEHIYKFQHWLFFIGLGVLLSLSLSVKANDFEGSNDRRSIALKARSFVSINENRTALSRKLLLSPDIGDGTNRIGQDCSKDDIVLFQGSTNPLPSGVPSYTVEIFNSCVSDCNIAEIHVSCGWFSSVRLVNPRVFRRLDYDDCLVNDGQPLGPGQSLSFQYANSFSYPLSVASVSCF

SEQ ID NO: 5251 - DNA, 531 bp, Arabidopsis thaliana
  CDS (1)..(531)
atgaaccgacggcgacttttggtatcggcgacactgctctcgtatttgctctacggcatggctctcgtctccgttgaagcctccggtggtgaaaagcttagagataatctggatttgactaaaacgacgacgtcgtcaccgagcatatcacatcggaaaatgctgcttctctctcctggtactggaaaaacagaaaggagtgtagagccggagagaattggagaaaagtgcaagagtacggacatagtggtgaaccaagcagtaacggaaccaatgcctaacggaataccaggctacatggtagagataacgaaccagtgtatgtctggatgcataatttcgaggatccacatcaactgcggttggttcagctcagctaagttgataaacccaagagtcttcaagcgtattcactacgacgactgtctcgtcaacaacggcaagcctttgccttttggctccactctctcttttcactacgccaacactttcccttaccatctctctgtcgccttcgtgacatgtgcttag

SEQ ID NO: 5252 - protein, 176 aa, Arabidopsis thaliana
MNRRRLLVSATLLSYLLYGMALVSVEASGGEKLRDNLDLTKTTTSSPSISHRKMLLLSPGTGKTERSVEPERIGEKCKSTDIVVNQAVTEPMPNGIPGYMVEITNQCMSGCIISRIHINCGWFSSAKLINPRVFKRIHYDDCLVNNGKPLPFGSTLSFHYANTFPYHLSVAFVTCA

SEQ ID NO: 5253 - DNA, 507 bp, Vitis vinifera
  CDS (1)..(507)
atgagagctttctccaatcggccattctctgtagttgcggctacattcctgttctttctggtgcttctgcttgcgtctcatacagctttgcaacacggcaatggttccgagaagtcaaggctgatgggatacatcactctctctgtccctcatcgcaagcttcttcatcgtgcgctggtggaaccgaaccgaatatggggagagaaatgttccaaggctgatatagtgatcaaccagggccccacgtctccactccctagcggcatacccacctacaccgttgagatcatgaacgtgtgcttcaccggctgtgacatctccggcatccacctcagctgcggatggttcagctccgctcgcctcatcaaccctcgaatcttcaagcgcctccgctacgacgactgcctcgtcaacgacggcagacccctcaccaacggtggaacactgtcgtttcagtacgccaacacctttccttacccactctctgtctcctccgttgtctgctga

SEQ ID NO: 5254 - protein, 168 aa, Vitis vinifera
MRAFSNRPFSVVAATFLFFLVLLLASHTALQHGNGSEKSRLMGYITLSVPHRKLLHRALVEPNRIWGEKCSKADIVINQGPTSPLPSGIPTYTVEIMNVCFTGCDISGIHLSCGWFSSARLINPRIFKRLRYDDCLVNDGRPLTNGGTLSFQYANTFPYPLSVSSVVC

SEQ ID NO: 5255 - DNA, 537 bp, Populus trichocarpa
  CDS (1)..(537)
atgaggacggtggtttcgaagataattggcgtcgttttggtgatggtcctcttgctggctatactgatatccacgtcttcatttctctcaggttcgggtaaagatgaaggtggattcatgggcttgagccacatgtttcttcacgaggaagggaattacagtgtctctgccctgcatcgcaagctgcttgttcgctcgctggcaatggaagaacctaacaggatcggagaaaagtgtacaagcgctgatattgtgataagtcagggacccacagctcctctctctagtggcatacctacctacactgttcagatcatgaacatgtgtgccactggatgtgacatctccagggttcacctcaactgtggctggttcagctctgctcgcctcatcgaccccaagatattcaagcggcttcgctacaacgactgccttgtaaacgatggaaagcctttggtaactggtggcattctcacctttgaatatgccaatacgttctcgtaccctttgtcagtctcctccatatcatgccattga

SEQ ID NO: 5256 - protein, 178 aa, Populus trichocarpa
MRTVVSKIIGVVLVMVLLLAILISTSSFLSGSGKDEGGFMGLSHMFLHEEGNYSVSALHRKLLVRSLAMEEPNRIGEKCTSADIVISQGPTAPLSSGIPTYTVQIMNMCATGCDISRVHLNCGWFSSARLIDPKIFKRLRYNDCLVNDGKPLVTGGILTFEYANTFSYPLSVSSISCH

SEQ ID NO: 5257 - DNA, 543 bp, Elaeis guineensis var. tenera
  CDS (1)..(543)
atgggctggtttccgcggcgccctgaagtccacttgctcccagccatcttaagcctggctttgctcttcgccattctctacttcgtggatgtaaacggcgggggaggagccctggtccttgttcccgggaagaatcagagcgcaggcaccactcggaagctcttcggcatcgtgggggagaggatgggggtggagtcgtgctccaaggacgacgtggtggtgtaccagggggcgacggcgccgttgccgaacgggataccgacgtacacggtgcaggtactgaacgtgtgctcgacggggtgcgcggtggcggacatccacgtgagctgtgggtggttcagctcggcacgtctcatcaaccctcgggtgttccgccggctcggctacgacgactgcctggtgaacgacggcgccgtgctccgccccggccagtccctctctttccagtatgccaacaccctatccctacccgctctacgtctcctccgtctcctggcacttgatcatatatcatgcatgcgcttccttcttcttcccttgtag

SEQ ID NO: 5258 - protein, 180 aa, Elaeis guineensis var. tenera
MGWFPRRPEVHLLPAILSLALLFAILYFVDVNGGGGALVLVPGKNQSAGTTRKLFGIVGERMGVESCSKDDVVVYQGATAPLPNGIPTYTVQVLNVCSTGCAVADIHVSCGWFSSARLINPRVFRRLGYDDCLVNDGAVLRPGQSLSFQYANTLSLPALRLLRLLALDHISCMRFLLLPL

SEQ ID NO: 5259 - DNA, 609 bp, Oryza sativa subsp. japonica
  CDS (1)..(609)
atggccgactgcactacgatgcgtttggcttcatctgtgaccatcatcttgctgctgctcgtagctagccaagctctagtagtctctggcgagtcatcttcctccgcgatgcagtccaagacgttgaacatgaacaagcttctcaacatcagtgaagatcactctcctaatggcggacgccactggatgcagcggatgcagccggacagctgctcggagcagaacgtggtggtgtaccagaacaacgcggagcacctccccagcggcatcccgacctacagcgtggaaatcatcaacgtctgcacggcgtgcacggtgtacgacgtccacatctcctgcggcgagtttgcctccgcggagctcgtcgaccccagccagttccagcgtatcggcttcaacgactgtctggtgaagggcggaggccggttgggtcctagcgaggccgtctccttccagtactccaactccttcgcctacccgctcgccgtagctaatgtcgcgtgttttcattattccattgtttgggcaagcatgataccgtgtttgccagaacatgcttgtcacacggcctcatctgtaaagggccttggcccacgacctcatgcgtag

SEQ ID NO: 5260 - protein, 202 aa, Oryza sativa subsp. japonica
MADCTTMRLASSVTIILLLLVASQALVVSGESSSSAMQSKTLNMNKLLNISEDHSPNGGRHWMQRMQPDSCSEQNVVVYQNNAEHLPSGIPTYSVEIINVCTACTVYDVHISCGEFASAELVDPSQFQRIGFNDCLVKGGGRLGPSEAVSFQYSNSFAYPLAVANVACFHYSIVWASMIPCLPEHACHTASSVKGLGPRPHA

SEQ ID NO: 5261 - DNA, 519 bp, Brassica napus
  CDS (1)..(519)
atgagccgacggcgactactgttatcggcgacgatactctcgtatttgctccacggaatggctctcgtctccgtcgtagcctccggcgtggaggaggttagtagagataacgtggatttgaccaaaacgacgacgttagctacaacctatacgcatcggaagatgctacgtctctctcatgagacgagagtagagccggataggatcggagagaagtgcaagaagtcagacattgtggtgaaccaagcagcgaccgaacctatgcccaacggaatacccggttacaccgtggagatcacgaaccagtgcatgtctggatgcaacatctcgaggatccacgtcagctgcggttggttcagctccgctaagttggttaacccgagagttttcaagcgtattcactacgatgactgtctcgtcaacaacgggaagcctttgccttatggctcgacgctctctttccactacgccaacactttcccttaccgtctggctgtcgcgttcgttacctgctcttga

SEQ ID NO: 5262 - protein, 172 aa, Brassica napus
MSRRRLLLSATILSYLLHGMALVSVVASGVEEVSRDNVDLTKTTTLATTYTHRKMLRLSHETRVEPDRIGEKCKKSDIVVNQAATEPMPNGIPGYTVEITNQCMSGCNISRIHVSCGWFSSAKLVNPRVFKRIHYDDCLVNNGKPLPYGSTLSFHYANTFPYRLAVAFVTCS

SEQ ID NO: 5263 - DNA, 516 bp, Brassica napus
  CDS (1)..(516)
atgagccgacggcgactactgttatcggcgacgatactctcgtatttgctccacggaatggctctcgtctctgtcgtagcctccggcgtggaggaggttagagataacgtggatttgaccaaaacgacgacgttagctacaacctctacgcatcggaagatgctacgtctctctcatgagacgagagtagagccggataggatcggagagaagtgcaagaagtcagacattgtggtgaaccaagcagcgaccgaacctatgcccaacggaatacccggttacaccgtggagatcacgaaccagtgcatgtctggatgcaacatctcgaggatccacgtcagctgcggttggttcagctccgctaagttggttaacccgagagttttcaagcgtattcactacgatgactgtctcgtcaacaacgggaagcctttgccttatggctcgacgctctctttccactacgccaacactttcccttaccgtctggctgtcgcgttcgttacctgctcttga

SEQ ID NO: 5264 - protein, 171 aa, Brassica napus
MSRRRLLLSATILSYLLHGMALVSVVASGVEEVRDNVDLTKTTTLATTSTHRKMLRLSHETRVEPDRIGEKCKKSDIVVNQAATEPMPNGIPGYTVEITNQCMSGCNISRIHVSCGWFSSAKLVNPRVFKRIHYDDCLVNNGKPLPYGSTLSFHYANTFPYRLAVAFVTCS

SEQ ID NO: 5265 - DNA, 537 bp, Glycine max
  CDS (1)..(537)
atggaaccgcgttcgggtcggcgaatcgtcgacttcgtaaccataaccgtcttctccctcgcactccttgccgttttgacaggttttggtggtggtgggactctcaccgtagccatggcggtgtccgtgacgcgtggttcggagaaaggaaccgtcgctagttcgcatcgcaaacttcttactagtggcaatggcaatgaaagagtggaaccgaaccgaatatggggtgagaagtgcagcaagtgtgatgtagtgatcaaccagggccccacagcacctcttccaagtggcattccgacctacacagtagagataatgaatatgtgtgtgagtggttgcgacatctctggcatacacctcagatgcggctggttcagctctgcacgcctcatcaaccctaagctcttcaagcgcctccgttacaacgactgtctcgtcaatgatggcaggcccttgatcaacggtgccaccatttccttccagtatgccaacaccttcctctaccctctctcagtttcctctgttgtctgtgtatga

SEQ ID NO: 5266 - protein, 178 aa, Glycine max
MEPRSGRRIVDFVTITVFSLALLAVLTGFGGGGTLTVAMAVSVTRGSEKGTVASSHRKLLTSGNGNERVEPNRIWGEKCSKCDVVINQGPTAPLPSGIPTYTVEIMNMCVSGCDISGIHLRCGWFSSARLINPKLFKRLRYNDCLVNDGRPLINGATISFQYANTFLYPLSVSSVVCV

SEQ ID NO: 5267 - DNA, 510 bp, Zea mays
  CDS (1)..(510)
atgggagaatggtgcttcaagaaacgcgcagctctggtgattattgtggccattattagctcgctgcagctgctcctgataactgctcaagaagctggaggagaccacgaggtgtggtcgtcgtcatcctcgccggccggtggtcgtggtggcggcgccgtcgtcgtcccgacggcgcggatggggccggacgggtcgtcgtcgtgttcgggggaggaggcggtggtggtgtaccagagcagcgccaaccctctgcccagcggcatcccggcctacaccgtgcagatcatcaacgtctgcggcggagggtgcaccgtgtacgacgtgcacgtctcctgcggcgacttcgcctccacggagctcgtcgacccggccaagttccagcgcgtcgccttcgacgactgcgtcgtcaagggcggcgccgccttggaacccagcgagaccgtctccttccagtactccaactccttctcctaccagctcagtgtcgcctccgtcgcgtgccactag

SEQ ID NO: 5268 - protein, 169 aa, Zea mays
MGEWCFKKRAALVIIVAIISSLQLLLITAQEAGGDHEVWSSSSSPAGGRGGGAVVVPTARMGPDGSSSCSGEEAVVVYQSSANPLPSGIPAYTVQIINVCGGGCTVYDVHVSCGDFASTELVDPAKFQRVAFDDCVVKGGAALEPSETVSFQYSNSFSYQLSVASVACH

SEQ ID NO: 5269 - DNA, 20 bp, Artificial sequence
  primer
atggaaccgcgttcgggtcg

SEQ ID NO: 5270 - DNA, 20 bp, Artificial sequence
  primer
tcatacacagacaacagagg

SEQ ID NO: 5271 - protein, 159 aa, Artificial sequence
  consensus sequence
  Variant (2)..(26): Xaa in position 2 to 26 is any amino acid
  Variant (27)..(45): Xaa in position 27 to 45 is any or no amino acid
  Variant (47)..(54): Xaa in position 47 to 54 is any amino acid
  Variant (55)..(59): Xaa in position 55 to 59 is any or no amino acid
  Variant (61)..(62): Xaa in position 61 to 62 is any amino acid
  Variant (64)..(67): Xaa in position 64 to 67 is any amino acid
  Variant (69)..(69): Xaa in position 69 is any amino acid
  Variant (71)..(71): Xaa in position 71 is any amino acid
  Variant (75)..(75): Xaa in position 75 is any amino acid
  Variant (77)..(77): Xaa in position 77 is any amino acid
  Variant (79)..(79): Xaa in position 79 is any amino acid
  Variant (81)..(81): Xaa in position 81 is any amino acid
  Variant (83)..(83): Xaa in position 83 is any amino acid
  Variant (85)..(86): Xaa in position 85 to 86 is any amino acid
  Variant (87)..(87): Xaa in position 87 is any or no amino acid
  Variant (89)..(93): Xaa in position 89 to 93 is any amino acid
  Variant (95)..(96): Xaa in position 95 to 96 is any amino acid
  Variant (99)..(99): Xaa in position 99 is any amino acid
  Variant (101)..(101): Xaa in position 101 is any amino acid
  Variant (103)..(104): Xaa in position 103 to 104 is any amino acid
  Variant (106)..(107): Xaa in position 106 to 107 is any amino acid
  Variant (109)..(110): Xaa in position 109 to 110 is any amino acid
  Variant (112)..(112): Xaa in position 112 is any amino acid
  Variant (114)..(117): Xaa in position 114 to 117 is any amino acid
  Variant (122)..(123): Xaa in position 122 to 123 is any amino acid
  Variant (125)..(126): Xaa in position 125 to 126 is any amino acid
  Variant (128)..(133): Xaa in position 128 to 133 is any amino acid
  Variant (136)..(136): Xaa in position 136 is any amino acid
  Variant (138)..(138): Xaa in position 138 is any amino acid
  Variant (140)..(140): Xaa in position 140 is any amino acid
  Variant (142)..(142): Xaa in position 142 is any amino acid
  Variant (144)..(144): Xaa in position 144 is any amino acid
  Variant (145)..(151): Xaa in position 145 to 151 is any or no amino acid
  Variant (153)..(153): Xaa in position 153 is any amino acid
  Variant (155)..(156): Xaa in position 155 to 156 is any amino acid
  Variant (158)..(158): Xaa in position 158 is any amino acid
GXXXXXXXXXXXXXXXXXXXXXXXXXXXXXXXXXXXXXXXXXXXXPXXXXXXXXXXXXXVXXQXXXXPXPXGIPXYXVXIXNXCXXXCXXXXXHXXCGXFXSXXLXXPXXFXRXXXXDCLVXXGXXLXXXXXXSFXYXNXFXYXXXXXXXXLXVXXVXC

SEQ ID NO: 5272 - protein, 60 aa, Artificial sequence
  protein pattern
  Variant (2)..(2): Xaa in position 2 is any amino acid
  Variant (3)..(3): Xaa in position 3 is Ile or Val
  Variant (4)..(5): Xaa in position 4 to 5 is any amino acid
  Variant (6)..(6): Xaa in position 6 is Ile or Val
  Variant (8)..(8): Xaa in position 8 is Ile, Leu or Val
  Variant (9)..(9): Xaa in position 9 is Asn, Arg or Ser
  Variant (12)..(12): Xaa in position 12 is any amino acid
  Variant (14)..(14): Xaa in position 14 is any or no amino acid
  Variant (16)..(17): Xaa in position 16 to 17 is any amino acid
  Variant (18)..(18): Xaa in position 18 is any or no amino acid
  Variant (20)..(20): Xaa in position 20 is Ile or Val
  Variant (21)..(21): Xaa in position 21 is Asp or Asn
  Variant (23)..(24): Xaa in position 23 to 24 is any amino acid
  Variant (26)..(26): Xaa in position 26 is any amino acid
  Variant (28)..(28): Xaa in position 28 is Ile or Leu
  Variant (29)..(29): Xaa in position 29 is any amino acid
  Variant (30)..(30): Xaa in position 30 is Phe or Tyr
  Variant (31)..(31): Xaa in position 31 is Asp or Asn
  Variant (36)..(36): Xaa in position 36 is any amino acid
  Variant (37)..(37): Xaa in position 37 is Asp, Gly or Asn
  Variant (39)..(40): Xaa in position 39 to 40 is any amino acid
  Variant (42)..(43): Xaa in position 42 to 43 is any amino acid
  Variant (44)..(44): Xaa in position 44 is Gly or Ser
  Variant (45)..(45): Xaa in position 45 is Ala, Glu, Gly, Gln or Ser
  Variant (46)..(46): Xaa in position 46 is any amino acid
  Variant (47)..(47): Xaa in position 47 is Ile, Leu or Val
  Variant (48)..(48): Xaa in position 48 is Ser or Thr
  Variant (50)..(50): Xaa in position 50 is any amino acid
  Variant (52)..(52): Xaa in position 52 is Ala or Ser
  Variant (54)..(58): Xaa in position 54 to 58 is any amino acid
  Variant (59)..(59): Xaa in position 59 is any or no amino acid
CXXXXXHXXCGXFXSXXXLXXPXXFXRXXXXDCLVXXGXXLXXXXXXXFXYXNXXXXXXL

SEQ ID NO: 5273 - protein, 24 aa, Artificial sequence
  protein pattern
  Variant (2)..(2): Xaa in position 2 is Ala, Gly, Asn or Ser
  Variant (3)..(3): Xaa in position 3 is Ala, Asn, Pro or Ser
  Variant (4)..(4): Xaa in position 4 is Ala or Thr
  Variant (5)..(5): Xaa in position 5 is Ala, Glu, Asn or Ser
  Variant (6)..(6): Xaa in position 6 is any amino acid
  Variant (7)..(7): Xaa in position 7 is Leu or Met
  Variant (8)..(8): Xaa in position 8 is Pro or Ser
  Variant (9)..(9): Xaa in position 9 is Asn or Ser
  Variant (13)..(14): Xaa in position 13 to 14 is any or no amino acid
  Variant (16)..(17): Xaa in position 16 to 17 is any or no amino acid
  Variant (19)..(19): Xaa in position 19 is Glu or Gln
  Variant (20)..(20): Xaa in position 20 is Ile or Val
  Variant (21)..(21): Xaa in position 21 is any amino acid
  Variant (23)..(23): Xaa in position 23 is any amino acid
QXXXXXXXXGIPXXTXXVXXXNXC

SEQ ID NO: 5274 - DNA, 1314 bp, Saccharomyces cerevisiae
  CDS (1)..(1314)
atgggacaaggtgtatcatctggacaagacaaaaagaagaagaagggatctaatcagaaacccaaatatgaacctcccgttcaatctaaatttggtcgtaagaaaagaaagggaggtccagctactgctgaaaaattacccaacatatatccaagtactcgttgtaagttaaagcttctaaggatggaacgaattaaagaccatttgttattagaagaagaatttgtctctaactctgaaattttaaaaccctttgaaaagaagcaggaggaggaaaagaaacaattggaagaaatacgtggaaatccattgagcattgggacccttgaagaaattatagacgatgatcatgcgatagtgacaagtccaactatgcctgattattatgtatctatcttatcctttgtcgataaagagttactagagcctggatgttctgtgttattgcatcataaaaccatgtccatcgtaggtgttttacaggatgacgccgatccaatggtttcggtcatgaaaatggataagtcgccaacagaatcatacagtgatattggtggcttagaatctcaaattcaagaaataaaagagtctgtagagttaccgttaacacaccccgaactgtatgaagagatgggtatcaaacctcccaagggtgtgattctttatggtgcacccggtacaggtaagacattgctagcaaaggctgttgcaaatcaaacatctgccacattcttaaggattgttggctcagagttaattcaaaaatatttgggggatggtcctaggttgtgtaggcaaattttcaaagtagcgggtgagaatgcaccaagtattgtatttattgatgaaatagacgccattggtactaaaagatatgactccaatagtggtggtgagagagaaattcagagaaccatgctggaattgctgaaccagctggacgggttcgacgacagaggggatgtgaaggtgattatggccactaacaaaatcgagactcttgacccagcattaatcaggcctgggagaattgatcgtaaaatcttatttgaaaaccctgatctaagtactaagaaaaaaattttagggattcacacttccaagatgaatttaagtgaggacgttaatcttgaaactttagtaacaacaaaggatgatttgtcaggcgccgatatccaggcaatgtgtacagaagcaggtttgttagcccttagagagagaagaatgcaagttacagcggaggattttaaacaagccaaggagagagtcatgaaaaataaagttgaggaaaatttagaaggtttatacttgtga

SEQ ID NO: 5275 - protein, 437 aa, Saccharomyces cerevisiae
MGQGVSSGQDKKKKKGSNQKPKYEPPVQSKFGRKKRKGGPATAEKLPNIYPSTRCKLKLLRMERIKDHLLLEEEFVSNSEILKPFEKKQEEEKKQLEEIRGNPLSIGTLEEIIDDDHAIVTSPTMPDYYVSILSFVDKELLEPGCSVLLHHKTMSIVGVLQDDADPMVSVMKMDKSPTESYSDIGGLESQIQEIKESVELPLTHPELYEEMGIKPPKGVILYGAPGTGKTLLAKAVANQTSATFLRIVGSELIQKYLGDGPRLCRQIFKVAGENAPSIVFIDEIDAIGTKRYDSNSGGEREIQRTMLELLNQLDGFDDRGDVKVIMATNKIETLDPALIRPGRIDRKILFENPDLSTKKKILGIHTSKMNLSEDVNLETLVTTKDDLSGADIQAMCTEAGLLALRERRMQVTAEDFKQAKERVMKNKVEENLEGLYL

SEQ ID NO: 5276 - DNA, 1332 bp, Glycine max
  CDS (25)..(1332)
atgggtcagggaactccgggcggcatgaaccggcagggcgaccggaagccggacggcggcgacaagaaggagaagaagttcgagccgtcggctccgccggcgcgcgtggggcggaaacagcggaagcagaaaggtccggaggcggcggcgcggttgccgacagtgactccggtgacgaagtgcaaactgcggcttctgaagctggagcggatcaaggactaccttctgatggaggaggagttcgtggcgaatcaggagcgactcaagccgcaggaggagaaggccgaggaagacagatccaaggtcgatgatctccgaggctctcccatgagcgtcggaaacctcgaagagctcatcgacgagaatcacgctattgtctcctcctccgttgggcctgagtactatgtcggaatcctgtctttcgttgataaggatcagttggagcctggttgtgctattttgatgcataataaggttctttctgttgttgggcttcttcaagatgaagttgatccaatggtctctgtcatgaaggttgagaaggctcctctggaatcttatgctgacattggtggtttagatgcccaaatacaggaaattaaagaagcagttgagctacccctgacgcatcctgaactatatgaagacattggtatcaagcctcctaagggggtcattttatatggagaacctggaactgggaagacattgcttgcgaaggctgtggcaaactcaacatcagcaacattcttgcgtgttgttggtagtgaactgatacaaaagtacttgggagatggcccaaaacttgtaagagaacttttcagagttgctgatgatctttctccttctattgtattcattgatgaaattgatgcagttggtacaaaaaggtatgatgctcactcaggaggagaacgtgaaattcaaaggaccatgctagagttgctgaaccagttagatggttttgattcaagaggagatgtaaaagtgattctggcaaccaacagaattgaaagtcttgatccagctttgctacgacctggtcgaattgacaggaagatagaatttcctcttcctgatatcaaaacaaggagacgcatcttccagatacacacgtcaaggatgacattagctgatgatgtcaacttggaagaatttgttatgactaaagacgaattctccggagctgatataaaggcaatatgtactgaagctggtttacttgctctacgagaacgtcgaatgaaggtgactcatgccgactttaagaaggccaaggataaagtgatgtttaagaagaaagaaggggtgcctgaagggctgtatatgtga

SEQ ID NO: 5277 - protein, 435 aa, Glycine max
MNRQGDRKPDGGDKKEKKFEPSAPPARVGRKQRKQKGPEAAARLPTVTPVTKCKLRLLKLERIKDYLLMEEEFVANQERLKPQEEKAEEDRSKVDDLRGSPMSVGNLEELIDENHAIVSSSVGPEYYVGILSFVDKDQLEPGCAILMHNKVLSVVGLLQDEVDPMVSVMKVEKAPLESYADIGGLDAQIQEIKEAVELPLTHPELYEDIGIKPPKGVILYGEPGTGKTLLAKAVANSTSATFLRVVGSELIQKYLGDGPKLVRELFRVADDLSPSIVFIDEIDAVGTKRYDAHSGGEREIQRTMLELLNQLDGFDSRGDVKVILATNRIESLDPALLRPGRIDRKIEFPLPDIKTRRRIFQIHTSRMTLADDVNLEEFVMTKDEFSGADIKAICTEAGLLALRERRMKVTHADFKKAKDKVMFKKKEGVPEGLYM

SEQ ID NO: 5278 - DNA, 1344 bp, Zea mays
  CDS (1)..(1344)
atggggcagggcactccgggagggatgggcaagcagggcggcgctggcgaccgcaagcccggggacggcggcgacaagaaggacaagaagtttgagccgccggccgcgccctcccgcgtcggccgcaagcagcgcaagcagaagggcgccgaggcggccgcgcgcctccccaacgtcgcgccgctctccaagtgccgactccgcctcctcaagctcgagcgggtcaaggactacctcctcatggaggaggagttcgtcgccgcgcaggaacgcctccgtccccaggaagacaaggccgaggaggaccgatccaaggtcgacgacctccgcggcacccccatgagcgtcggatccctcgaggagattatcgacgagagccacgccatcgtctcctcctctgtcggacccgagtactatgtcagcatcctctcctttgtcgacaaggaccagctcgagccgggatgctccatcctcatgcacaataaggttctttctgtagttggtatattgcaagatgaagttgatcctatggtatctgtgatgaaagttgagaaagcacctttggaatcttatgctgacattggtggactagattcccagattcaagaaattaaagaggctgttgagcttcccttgactcatcctgagttgtatgaagacattgggatcaggccacccaagggagtcatattatatggcgaacctggaactggaaaaactctactcgccaaggctgttgccaattcaacatctgcgactttcttgcgtgttgtcggtagtgaacttattcaaaagtaccttggggatggtcccaagctagtcagagaattgtttagggtggctgatgaactttctccctcaatagtcttcattgatgagattgacgcagttggaacgaagaggtatgatgctcattcaggaggggagcgtgagattcaaagaactatgttggagctgctgaatcagctagatggttttgactcacgtggagatgttaaagtcattctagcaacaaaccgcattgaaagtcttgatccagccttgcttcggccaggccgtatagaccggaagattgaatttcctctaccagatattaaaactagacgacgcatcttccagatacacacatcgaaaatgacattagctgatgatgtgaacttggaagagtttgttatgaccaaagacgagttttcgggtgctgatattaaggcaatctgcacagaggctggattgcttgccttaagagaacgcagaatgaaggtgacccatgcagatttcaagaaggcaaaggagaaggtgatgtacaagaagaaggaaggtgttccggatggtctctacatgtag

SEQ ID NO: 5279 - protein, 447 aa, Zea mays
MGQGTPGGMGKQGGAGDRKPGDGGDKKDKKFEPPAAPSRVGRKQRKQKGAEAAARLPNVAPLSKCRLRLLKLERVKDYLLMEEEFVAAQERLRPQEDKAEEDRSKVDDLRGTPMSVGSLEEIIDESHAIVSSSVGPEYYVSILSFVDKDQLEPGCSILMHNKVLSVVGILQDEVDPMVSVMKVEKAPLESYADIGGLDSQIQEIKEAVELPLTHPELYEDIGIRPPKGVILYGEPGTGKTLLAKAVANSTSATFLRVVGSELIQKYLGDGPKLVRELFRVADELSPSIVFIDEIDAVGTKRYDAHSGGEREIQRTMLELLNQLDGFDSRGDVKVILATNRIESLDPALLRPGRIDRKIEFPLPDIKTRRRIFQIHTSKMTLADDVNLEEFVMTKDEFSGADIKAICTEAGLLALRERRMKVTHADFKKAKEKVMYKKKEGVPDGLYM

SEQ ID NO: 5280 - DNA, 1203 bp, Oryza sativa
  CDS (1)..(1203)
atggccgacggggaggacgccgccgccgcccgccgccgcgcctccgtgacggagtaccggaagaagctgctcaactgcagggagctcgagtcgcgcgtcagcaccgtgagggaaaacctaaaaaatgctaagaaggactttacaaagaccgaagatgacttaaaatccctgcaaagtgttgggcagatcatcggagaggttctccgccctcttgataatgaacgttttattgttaaggctagcagtggtcccagatatgtggttggttgccggagcaaagtggacaaggagaaattgacttcgggaactcgtgttgttcttgacatgacaacactgacaatcatgcgcacacttccacgtgaggtggaccctgtggtttacaacatgcttcatgaagaccctggtaatgtcagttactctgctgttggtggtctgtctgatcagattagagagctcagggagtccatcgaattgcccttaatgaaccctgagctctttcttcgtgttgggatcaagccccccaagggtgttctactctatggtccaccaggaactggtaagacactattggcgagggctattgccagtaacatcgatgccaactttttgaagattgtttcaagtgctataattgacaagtacattggagagagtgcccgcttgattagggaaatgtttggctatgcacgtgatcatcaaccatgcataatcttcatggacgaaatcgatgccattggtgggcggcggttcagtgaaggaactagtgctgatcgcgagatccagcgcacactgatggaactgctaaatcagttagatggatttgatgaacttggaaaggtgaaaatgatcatggctaccaatagacctgatgttctggaccctgcgctactgcgtcctggacgtctagacaggaagattgagattccgctaccaaatgagcaagcaagaatggaagttcttaaaatccatgctgctggtattgccaagcatggagaaattgattatgaggcagttgttaaactggctgagggcttcaatggggctgatcttcgcaacgtctgcactgaagcgggtatggctgcaattcgtgctgaacgggactacgttgtccatgaggacttcatgaaggctgtcaggaagctgaacgacgccaagaagctggaatccagcgcccactacagtgcagacttcggcaaagagtaa

SEQ ID NO: 5281 - protein, 400 aa, Oryza sativa
MADGEDAAAARRRASVTEYRKKLLNCRELESRVSTVRENLKNAKKDFTKTEDDLKSLQSVGQIIGEVLRPLDNERFIVKASSGPRYVVGCRSKVDKEKLTSGTRVVLDMTTLTIMRTLPREVDPVVYNMLHEDPGNVSYSAVGGLSDQIRELRESIELPLMNPELFLRVGIKPPKGVLLYGPPGTGKTLLARAIASNIDANFLKIVSSAIIDKYIGESARLIREMFGYARDHQPCIIFMDEIDAIGGRRFSEGTSADREIQRTLMELLNQLDGFDELGKVKMIMATNRPDVLDPALLRPGRLDRKIEIPLPNEQARMEVLKIHAAGIAKHGEIDYEAVVKLAEGFNGADLRNVCTEAGMAAIRAERDYVVHEDFMKAVRKLNDAKKLESSAHYSADFGKE

SEQ ID NO: 5282 - DNA, 1275 bp, Oryza sativa
  CDS (1)..(1275)
atggccacggtggcgatggacatctccaagccccctcccgcggcgggcggcgacgaggctgcggcggcgaaggggaggggcggcgccggaggaggaggtggggaggggctgcggcagtactacctgcagcacatccacgacctgcagctccagatccggcagaagacgcacaacctcaaccgcctcgaggcccagcgcaacgacctcaactcccgagttagaatgctcagggaagagctgcagttgcttcaagaacctggctcgtatgttggtgaggtggtgaaggtcatgggtaaatcaaaggttctagtgaaggtacatccagaaggcaaatatgtggtggatattgataaaagcattgatattacaaagatcacaccttcaacaagagttgctcttcgaaatgatagctatatgcttcatttgatcctgccaagcaaagttgatccgttggtcaatcttatgaaagttgagaaggttcctgattctacttatgatatgattggaggtcttgatcagcaaatcaaagagatcaaagaggtcattgaacttcctatcaaacatccagagctatttgagagtcttggaattgcccaaccaaagggtgtccttctctatggccctccaggcacaggaaaaacattgttggcacgtgcagttgctcatcacactgactgcaccttcatcagggtgtctggttccgagttagttcagaagtacattggtgagggttctcggatggtccgtgaactctttgttatggccagggaacatgcaccatccattattttcatggatgaaatagactccattggatctgctaggatggagtctggaactggcaacggtgacagtgaagtccagcgaaccatgcttgagcttctgaaccaacttgatggttttgaagcatcaaacaaaataaaggttctgatggcaacaaataggatagacatcttggatcaggcccttctgaggcctggtcgcatagacaggaaaattgaatttcctaatcctaatgaggattcacgctttgatatcttgaagattcattcaagaaaaatgaacttgatgcgtggtattgatctgaaaaagatcgctgaaaagatgaatggggcttcaggagccgagctcaaggcggtctgcacagaagctggaatgtttgctcttcgtgagagaagggtgcatgtaacacaagaggactttgagatggcagtggcgaaggtgatgaagaaagacacggaaaagaacatgtccctacggaagctctggaagtga

SEQ ID NO: 5283 - protein, 424 aa, Oryza sativa
MATVAMDISKPPPAAGGDEAAAAKGRGGAGGGGGEGLRQYYLQHIHDLQLQIRQKTHNLNRLEAQRNDLNSRVRMLREELQLLQEPGSYVGEVVKVMGKSKVLVKVHPEGKYVVDIDKSIDITKITPSTRVALRNDSYMLHLILPSKVDPLVNLMKVEKVPDSTYDMIGGLDQQIKEIKEVIELPIKHPELFESLGIAQPKGVLLYGPPGTGKTLLARAVAHHTDCTFIRVSGSELVQKYIGEGSRMVRELFVMAREHAPSIIFMDEIDSIGSARMESGTGNGDSEVQRTMLELLNQLDGFEASNKIKVLMATNRIDILDQALLRPGRIDRKIEFPNPNEDSRFDILKIHSRKMNLMRGIDLKKIAEKMNGASGAELKAVCTEAGMFALRERRVHVTQEDFEMAVAKVMKKDTEKNMSLRKLWK

SEQ ID NO: 5284 - DNA, 1260 bp, Oryza sativa
  CDS (1)..(1260)
atgtcgaccgccgccaccgccccgccgcccgccgcggtcctcccggcggctcccccgccgtcctaccccgccacctccgcgccctccgcctccgcggccgccgccgaggacgacgacgacctctacggccgcctcaagtcgctccagcgccacatggagttcgtcgagatacaggaggagtacgtcaaggacgagcagaagaacctgaagcgcgagctgctgcgcgcgcaggaggaggtgaagcggatccagtccgttcccctcgtgatcggccagttcatggagatggtcgacggcaacaacggaatcgtcggatccaccaccgggagcaactattatgtgcggatcctgagcaccatcaaccgcgagctgctcaagccctcggcgtccgtggcgctgcaccgccactcgaatgcgctcgtcgacgtgctgccgcccgaggcggactccagcatctctctgctcggatcatcggagaagcccaacgtcacttatacggatattggaggatgtgacatccaaaaacaagaaattcgggaggctgttgaattaccgctgacacatcatgagctgtacaagcagattggtattgatcctccaagaggtgtgcttctgtatggtccacctggaactggcaaaactatgctcgccaaagctgtggcacaccacactactgctgcatttatcagagttgttggttcagagtttgtgcagaagtacctgggtgagggacctaggatggttcgagatgtattccgtttggctaaagagaatgccccagctatcatattcatcgatgaggttgatgctatagcaactgctcgttttgatgctcagactggtgctgaccgagaagttcagcgtattcttatggaactactcaatcagatggatggatttgatcaaacagtgaatgtgaaggttataatggcgaccaacagggcggataccctagaccctgctctgttacgtccaggtagattggacaggaaaatcgagttccctcttccagatcgtcggcagaagaggcttgttttccaagtctgtactgctaaaatgaacttgagtgatgaggttgatttggaagattatgtttccagaccagataaaattagtgctgctgatattgctgctatctgtcaagaagctggtatgcatgctgtgcgcaaaaatcggtatgttatcctccccaaggacttcgagaagggttaccgaaccaatgtcaagaagcctgagactgactttgacttctacaaatga

SEQ ID NO: 5285 - protein, 419 aa, Oryza sativa
MSTAATAPPPAAVLPAAPPPSYPATSAPSASAAAAEDDDDLYGRLKSLQRHMEFVEIQEEYVKDEQKNLKRELLRAQEEVKRIQSVPLVIGQFMEMVDGNNGIVGSTTGSNYYVRILSTINRELLKPSASVALHRHSNALVDVLPPEADSSISLLGSSEKPNVTYTDIGGCDIQKQEIREAVELPLTHHELYKQIGIDPPRGVLLYGPPGTGKTMLAKAVAHHTTAAFIRVVGSEFVQKYLGEGPRMVRDVFRLAKENAPAIIFIDEVDAIATARFDAQTGADREVQRILMELLNQMDGFDQTVNVKVIMATNRADTLDPALLRPGRLDRKIEFPLPDRRQKRLVFQVCTAKMNLSDEVDLEDYVSRPDKISAADIAAICQEAGMHAVRKNRYVILPKDFEKGYRTNVKKPETDFDFYK

SEQ ID NO: 5286 - DNA, 1290 bp, Oryza sativa
  CDS (1)..(1290)
atgtcgtcgccgccgcccgccgccgccgccgcgatggccgtcgacgacgccgacgacgaccagctcgcctccatgtccacggaggacatcgtcagggcaacccgcctcctcgacaacgagacccgcgtcctcaaggatgagctgcagcggacgaaccttgaggtggaatcctacaaggagaagatcaaggagaaccaggagaagatcaaactcaacaagcagctgccttaccttgtcggcaacatcgtcgagatattggaaatgaaccccgaggatgaggctgaagaggatggtgcgaacatcgatctggattcacaaaggaaaggaaaatgcgttgttttgaagacatccacaagacaaacaatattccttcctgtaatcgggcttgttgaccctgaaaagctcaagcctggggatttggttggagtcaacaaagacagctacttgatactagacacgctaccttcagaatatgattcacgggttaaggcaatggaggtagatgaaaagcctacagaggattacaatgacattggtggccttgagaaacagattcaagagcttgttgaagcaatagtattgcccatgactcacaaggaccggtttcagaagttgggaattcgccccccgaaaggtgttcttttgtacggaccacctggcactggaaagaccctaatggctcgtgcatgtgctgcccaaactaacgccacatttctgaaacttgctggtccacagcttgtccagatgttcatcggtgatggtgcaaagcttgtccgtgatgcctttcagcttgcaaaggagaaatccccctgcatcatttttattgatgaaattgacgcaattggaacaaagcgttttgatagtgaagttagtggtgacagagaagtgcagcgcacaatgttggagttgctgaatcagctagatggattcagtagtgacgagaggataaaggtgatagctgcaactaatcgcgcggacattcttgatcctgctttgatgaggtctggtaggctggaccgaaaaattgagttccctcatccatccgaagaagcacgagctagaattttgcaaatccattcaagaaaaatgaatgtaaaccctgatgtcaactttgaagagttggcacgatctacggacgacttcaatggtgcacaactgaaggccgtttgtgtagaagcaggcatgcttgccctacgccgagatgctacagaggtgacacacgaggatttcaatgaagggatcatacaagtgcaagccaaaaagaagtccagtttaaattattacgcttaa

SEQ ID NO: 5287 - protein, 429 aa, Oryza sativa
MSSPPPAAAAAMAVDDADDDQLASMSTEDIVRATRLLDNETRVLKDELQRTNLEVESYKEKIKENQEKIKLNKQLPYLVGNIVEILEMNPEDEAEEDGANIDLDSQRKGKCVVLKTSTRQTIFLPVIGLVDPEKLKPGDLVGVNKDSYLILDTLPSEYDSRVKAMEVDEKPTEDYNDIGGLEKQIQELVEAIVLPMTHKDRFQKLGIRPPKGVLLYGPPGTGKTLMARACAAQTNATFLKLAGPQLVQMFIGDGAKLVRDAFQLAKEKSPCIIFIDEIDAIGTKRFDSEVSGDREVQRTMLELLNQLDGFSSDERIKVIAATNRADILDPALMRSGRLDRKIEFPHPSEEARARILQIHSRKMNVNPDVNFEELARSTDDFNGAQLKAVCVEAGMLALRRDATEVTHEDFNEGIIQVQAKKKSSLNYYA

SEQ ID NO: 5288 - DNA, 1230 bp, Oryza sativa
  CDS (1)..(1230)
atgtcgtcgccgccgcccgccgccgccgccgcgatggccgtcgacgacgccgacgacgaccagctcgcctccatgtccacggaggacatcgtcagggcaacccgcctcctcgacaacgagacccgcgtcctcaaggatgagctgcagcggacgaaccttgaggtggaatcctacaaggagaagatcaaggagaaccaggagaagatcaaactcaacaagcagctgccttaccttgtcggcaacatcgtcgagatattggaaatgaaccccgaggatgaggctgaagaggatggtgcgaacatcgatctggattcacaaaggaaaggaaaatgcgttgttttgaagacatccacaagacaaacaatattccttcctgtaatcgggcttgttgaccctgaaaagctcaagcctggggatttggttggagtcaacaaagacagctacttgatactagacacgctaccttcagaatatgattcacgggttaaggcaatggaggtagatgaaaagcctacagaggattacaatgacattggtggccttgagaaacagattcaagagcttgttgaagcaatagtattgcccatgactcacaaggaccggtttcagaagttgggaattcgccccccgaaaggtgttcttttgtacggaccacctggcactggaaagaccctaatggctcgtgcatgtgctgcccaaactaacgccacatttctgaaacttgctggtccacagcttgtccagatgttcatcggtgatggtgcaaagcttgtccgtgatgcctttcagcttgcaaaggagaaatccccctgcatcatttttattgatgaaattgacgcaattggaacaaagcgttttgatagtgaagttagtggtgacagagaagtgcagcgcacaatgttggagttgctgaatcagctagatggattcagtagtgacgagaggataaaggtgatagctgcaactaatcgcgcggacattcttgatcctgctttgatgaggtctggtaggctggaccgaaaaattgagttccctcatccatccgaagaagcacgagctagaattttgcaaatccattcaagaaaaatgaatgtaaaccctgatgtcaactttgaagagttggcacgatctacggacgacttcaatggtgcacaactgaaggccgtttgtgtagaagcaggcatgcttgccctacgccgagatgctacagaggtttgtgttacattctga

SEQ ID NO: 5289 - protein, 409 aa, Oryza sativa
MSSPPPAAAAAMAVDDADDDQLASMSTEDIVRATRLLDNETRVLKDELQRTNLEVESYKEKIKENQEKIKLNKQLPYLVGNIVEILEMNPEDEAEEDGANIDLDSQRKGKCVVLKTSTRQTIFLPVIGLVDPEKLKPGDLVGVNKDSYLILDTLPSEYDSRVKAMEVDEKPTEDYNDIGGLEKQIQELVEAIVLPMTHKDRFQKLGIRPPKGVLLYGPPGTGKTLMARACAAQTNATFLKLAGPQLVQMFIGDGAKLVRDAFQLAKEKSPCIIFIDEIDAIGTKRFDSEVSGDREVQRTMLELLNQLDGFSSDERIKVIAATNRADILDPALMRSGRLDRKIEFPHPSEEARARILQIHSRKMNVNPDVNFEELARSTDDFNGAQLKAVCVEAGMLALRRDATEVCVTF

SEQ ID NO: 5290 - DNA, 1353 bp, Oryza sativa
  CDS (1)..(1353)
atggggcagggcactcccggcgggatggggaagcagggcggcctccccggcgatcgcaagccgggcgacggcggcgccggcgacaagaaggaccgcaagttcgagccccccgccgcgccgtcccgcgtcggccggaagcagcggaagcagaaggggcccgaggcggcggcgcgcctgcccgccgtggcgccgctctccaagtgccgcctccgcttgctcaagctggagcgggtcaaggactacctcctcatggaggaggagttcgtcgtcagccaggagcggctgcgacccagcgaggacaagacggaggaggaccgatccaaggtcgatgacctccggggcacccccatgagcgttggctcgcttgaggagatcatcgatgagagccacgccatcgtctcgtcgtccgtcgggccggaatactatgttggcatattatcattcgtcgacaaggaccagctcgagccagggtgtgccattctgatgcataacaaggttctctctgtggttggaattttgcaagatgaggttgaccctatggtttctgtcatgaaagttgaaaaggcacctttggagtcttatgcggacatcggtggtctggatgcccaaattcaagagattaaagaggctgttgagcttcccttgactcatcctgagctatatgaggacattggaataaggcctcccaagggagtaatattatatggggaacctggcacaggcaaaactctacttgcaaaggcggttgctaattctacatcagcaacatttttgcgtgttgttgggagtgagttgatccaaaagtaccttggtgatggccccaagcttgtaagagaattgtttagggtggctgatgatctttctccgtcaattgtctttattgacgagattgatgcagtcggaacaaagaggtatgatgctcattcgggtggagagcgtgaaattcagagaaccatgttggagttgcttaatcagctggatggttttgattcaaggggagatgttaaagttattttagcaacaaatcgcattgaaagtcttgacccagctttgcttcgacctggtcggatagacagaaagattgaatttccgttaccagatattaaaaccaggaggcggatcttccagatacacacatctaagatgacattggcagatgatgttaacctagaagagtttgtgatgaccaaggatgagttttctggtgctgacatcaaagcaatatgtacggaggccggattgctcgctttaagggagcgcagaatgaaggtgacacatgccgatttcaagaaggccaaagagaaggtcatgttcaagaagaaggaaggtgtaccggaagggctttatatgtga

SEQ ID NO: 5291 - protein, 450 aa, Oryza sativa
MGQGTPGGMGKQGGLPGDRKPGDGGAGDKKDRKFEPPAAPSRVGRKQRKQKGPEAAARLPAVAPLSKCRLRLLKLERVKDYLLMEEEFVVSQERLRPSEDKTEEDRSKVDDLRGTPMSVGSLEEIIDESHAIVSSSVGPEYYVGILSFVDKDQLEPGCAILMHNKVLSVVGILQDEVDPMVSVMKVEKAPLESYADIGGLDAQIQEIKEAVELPLTHPELYEDIGIRPPKGVILYGEPGTGKTLLAKAVANSTSATFLRVVGSELIQKYLGDGPKLVRELFRVADDLSPSIVFIDEIDAVGTKRYDAHSGGEREIQRTMLELLNQLDGFDSRGDVKVILATNRIESLDPALLRPGRIDRKIEFPLPDIKTRRRIFQIHTSKMTLADDVNLEEFVMTKDEFSGADIKAICTEAGLLALRERRMKVTHADFKKAKEKVMFKKKEGVPEGLYM

SEQ ID NO: 5292 - DNA, 1290 bp, Oryza sativa
  CDS (1)..(1290)
atgacgtcatccggcgctcccccgccggcggcgatggccgtggacgacgcggaggacgaccagctcgcctccatgtccacggaggacatcgtccgtgcctcccgcctactcgacaacgagatccgcgtcctcaaggatgagctgcagcggaccaacttggagctggaatcgttcaaggagaagattaaggagaaccaggagaagattaagctcaacaagcagcttccctacctcgtcggcaacatcgttgagattctggaaatgaaccctgaggatgaagctgaggaggatggtgctaatattgatttagactcacaaaggaaaggaaaatgtgttgttctgaagacttccacaagacaaactatattccttcctgtggttgggctagttgaccctgataaactcaagcctggtgatttggttggagtaaacaaagacagctaccttatactggacacactgccatcagagtatgattcacgagtaaaggcaatggaggtggatgaaaaacccacagaggactacaatgatattggaggtcttgaaaagcagattcaagagcttgtggaggcaattgttttgccaatgacacacaaagatcggttccaaaagttgggcattcgcccccccaaaggagttcttttgtatggaccacctggaactgggaagacattgatggctcgtgcatgtgctgcacagacaaatgcgacgttcctgaaattagctggtccacaattagtccagatgtttatcggtgatggagcaaagctggttcgggatgcttttcagcttgctaaggagaaagctccctgcatcattttcattgatgagattgatgccattgggactaagaggtttgacagtgaggttagtggtgacagagaagttcagaggactatgttggaattgctgaaccaactcgatggatttagtagtgacgagcggataaaggtcatagcggcaacgaatcgtgctgacattcttgatcctgctttgatgcgatctggtcgtttggaccgaaagattgagtttcctcatccatctgaagaagcaagagctagaatcttgcaaattcactcaagaaaaatgaatgtaaacccagatgtgaattttgaagagctggctcgctcaacagatgacttcaatggagcgcaactgaaagctgtttgtgtcgaagctggtatgcttgcactgcggcgagatgctacagaggtgactcatgaggacttcaacgaaggcataatacaggtgcaggctaagaagaagtctagcctaaattattacgcttaa

SEQ ID NO: 5293 - protein, 429 aa, Oryza sativa
MTSSGAPPPAAMAVDDAEDDQLASMSTEDIVRASRLLDNEIRVLKDELQRTNLELESFKEKIKENQEKIKLNKQLPYLVGNIVEILEMNPEDEAEEDGANIDLDSQRKGKCVVLKTSTRQTIFLPVVGLVDPDKLKPGDLVGVNKDSYLILDTLPSEYDSRVKAMEVDEKPTEDYNDIGGLEKQIQELVEAIVLPMTHKDRFQKLGIRPPKGVLLYGPPGTGKTLMARACAAQTNATFLKLAGPQLVQMFIGDGAKLVRDAFQLAKEKAPCIIFIDEIDAIGTKRFDSEVSGDREVQRTMLELLNQLDGFSSDERIKVIAATNRADILDPALMRSGRLDRKIEFPHPSEEARARILQIHSRKMNVNPDVNFEELARSTDDFNGAQLKAVCVEAGMLALRRDATEVTHEDFNEGIIQVQAKKKSSLNYYA

SEQ ID NO: 5294 - DNA, 1281 bp, Oryza sativa
  CDS (1)..(1281)
atggcgccggagcccgaggacgacatcatgaacgagaagaacccgcgcccgctcgacgaggacgacatcgccctcctcaagacctacggtcttggaccttactcgaccagcattaagaaggttgagaaggaaatcaaagagatggcgaagaagataaatgatctctgtggaattaaagagtctgacactggattggctccacctagccagtgggaccttgtatccgataagcagatgatgcaggaggagcaacccctgcaggttgcaagatgcacaaagatcatcagccctaacacggacgatgctaaatatgtcatcaatgtcaagcaaattgcgaagtttgtggttgggttgggcgacaaggtctcccccactgatatcgaggaaggaatgcgggttggagttgatcgaaacaagtaccaaattcaaattcctttgccaccaaagattgatcccagcgttaccatgatgactgtggaagaaaaaccagatgtgacttacaatgatgttggtggatgcaaggagcagattgagaagatgcgtgaggtggttgagcttcctatgcttcacccagaaaagtttgtcaaacttggtatcgatcctcctaagggagtactgtgttatggccctcctggaactgggaaaacacttcttgctagggcagtggccaaccgcacggatgcttgctttattcgagtcataggaagtgagctagttcagaagtatgttggtgagggggcccgcatggttcgggaactcttccaaatggcacgatcgaagaaggcttgcattgtcttctttgatgaagtcgatgccatcggtggtgctcgctttgacgatggtgttggtggtgacaatgaggtccagcgcactatgcttgagattgttaatcagcttgatggatttgatgccaggggaaacatcaaggtcctcatggccaccaacaggcccgataccttggaccctgcattactacgtccagggcgtctggacaggaaagttgagtttggcctgccagacctggagggccggacccagatcttcaagatccacactcgcaccatgaactgcgagcgggacatccggtttgagctgctcgctcgcctctgccccaactccactggggccgacatacggagtgtgtgcacggaggctggcatgtacgccatccgcgctcgcaggaagacggtgacagagaaggatttcttggacgcggtgaataaggtgatcaagggttaccaaaagttcagcgcaacgcccaagtatatggtgtacaactag

SEQ ID NO: 5295 - protein, 426 aa, Oryza sativa
MAPEPEDDIMNEKNPRPLDEDDIALLKTYGLGPYSTSIKKVEKEIKEMAKKINDLCGIKESDTGLAPPSQWDLVSDKQMMQEEQPLQVARCTKIISPNTDDAKYVINVKQIAKFVVGLGDKVSPTDIEEGMRVGVDRNKYQIQIPLPPKIDPSVTMMTVEEKPDVTYNDVGGCKEQIEKMREVVELPMLHPEKFVKLGIDPPKGVLCYGPPGTGKTLLARAVANRTDACFIRVIGSELVQKYVGEGARMVRELFQMARSKKACIVFFDEVDAIGGARFDDGVGGDNEVQRTMLEIVNQLDGFDARGNIKVLMATNRPDTLDPALLRPGRLDRKVEFGLPDLEGRTQIFKIHTRTMNCERDIRFELLARLCPNSTGADIRSVCTEAGMYAIRARRKTVTEKDFLDAVNKVIKGYQKFSATPKYMVYN

SEQ ID NO: 5296 - DNA, 1272 bp, Oryza sativa
  CDS (1)..(1272)
atggcgacggcggacgtctcgcggccctcctcctccgcgccgacggcggcggctgcgggggcagacggccacggggcgaaggggagcgccttccgcggcgacgggctgcggccgtactaccagtcgcgcatccacgacctgcagctccagatccgccaagggacggacaacctcagccgcctcgaggcccagcggaacgtcctcaattcccaagttataacgctgggggaagagttgaaggtgctccatgaaccgggctcatatgttggtgaggttgtcaaggttatgggcaagtccaaggttctagtgaaggtgcacccagaaggaaaatatgttgttgatgtcgataaaagtattgatattacaaagctctcgccttcaacaagagttgctcttcgaaatgacagctatatgcttcatcttatcctgcccagcaaagttgatccattggttaatcttatgaaggttgagaaggttcctgattctacttatgatatgattggcggccttgatcagcagattaaggagatcaaagaggttattgagcttcccattaagcatcctgagctgtttgaaagtcttggaattgcccagccaaagggtgtccttctttacgggcctccgggtacaggaaaaacgctactagctcgggcagttgctcatcacaccgactgtacctttattagggtgtcaggttccgagttggttcagaagtatattggagagggttccagaatggttcgtgaactatttgtgatggccagagagcatgcaccatccataatctttatggatgaaatagactccattggatctgctagaatgcagtcaggatctgggggtggtgatagtgaggttcaacgcactatgcttgagcttctgaatcaacttgatggctttgaagcatcaaacaaaattaaggttcttatggcgacaaataggatggatattttggatcaagctctcctgaggcctggtcgcattgataggaagattgaatttccaaatccgaatgaagattcccgctttgatatcttgaagattcattcaagaaaaatgaacttgatgcgtggcattgatctgaaaaagattgcagagaagatgaatggggcatctggagcagagcttaaggcggtctgcacggaagcaggaatgtttgcccttcgcgagagaagggttcatgtcaaccaggaggatttcttgatggcggtggcgaaggtgatgaagaaggataccgaaaagaacatgtccctgcgcaagctctggaagtga

SEQ ID NO: 5297 - protein, 423 aa, Oryza sativa
MATADVSRPSSSAPTAAAAGADGHGAKGSAFRGDGLRPYYQSRIHDLQLQIRQGTDNLSRLEAQRNVLNSQVITLGEELKVLHEPGSYVGEVVKVMGKSKVLVKVHPEGKYVVDVDKSIDITKLSPSTRVALRNDSYMLHLILPSKVDPLVNLMKVEKVPDSTYDMIGGLDQQIKEIKEVIELPIKHPELFESLGIAQPKGVLLYGPPGTGKTLLARAVAHHTDCTFIRVSGSELVQKYIGEGSRMVRELFVMAREHAPSIIFMDEIDSIGSARMQSGSGGGDSEVQRTMLELLNQLDGFEASNKIKVLMATNRMDILDQALLRPGRIDRKIEFPNPNEDSRFDILKIHSRKMNLMRGIDLKKIAEKMNGASGAELKAVCTEAGMFALRERRVHVNQEDFLMAVAKVMKKDTEKNMSLRKLWK

SEQ ID NO: 5298 - DNA, 1206 bp, Oryza sativa
  CDS (1)..(1206)
atggcggcggagggggaggacgcggcggccgcgcgacgccgcgcggcggccaccgactacaggaagaagctcctcacctgcagggagctcgaggcgcgcgcccgcacggcaagggacaacctgaaaaatgcaaagaaagattttgggaaaaccgaggatgacttgaagtcattgcaaagtgtaggccaaataattggtgaagtacttcgaccattggatagtgaacgattcatcgtcaaagccagcagtgggccccgctatgttgttggctgccgaagtaaagttgacaaagaaaagttgattgctggaacgagggttgttcttgacatgacaacccttaccatcatgcgcacactgccacgagaggttgatccagtggtatataacatgctacatgaagaccctggcaacgtcagttactcagctgtgggtggattgtcggatcaaataagggaacttagggagtccattgaacttcccctgatgaatccaaaattgtttcttcgtgtagggattaaaccgccaaagggtgttctgctctatggtccacctggaactgggaagacactacttgctagagctattgccagtaacattgatgcaaactttttaaagattgtgtcaagtgctatcattgacaagtacataggtgaaagtgcacgtctcataagagagatgttttcctatgcacgggagcatcaaccatgcatcattttcatggatgaaattgatgccatcggtggccgaaggttcagtgaaggaaccagtgctgaccgggaaattcagagaacactaatggagctcttaaaccagttagatggatttgatgagcttggaaaggtaaaaatgatcatggcgactaatcgtcctgatgttttggaccctgcactccttcgtcctgggcggttggacaggaagattgaaattccactgccaaatgagcagtcgaggatggaagtcctcaaaattcacgcagctggtattgctaaacatggtgaaatcgattatgaagctgtcgtgaagctagctgaaggcttcaatggtgccgatctgcgcaatgtctgcactgaggctggcatggctgctattcgagcagagcgcgactatgtcattcatgaagatttcatgaaggcggtgcgcaagctgaacgacgccaagaagctcgagtctagtgcgcactacagcgcggactttggcaaggaatga

SEQ ID NO: 5299 - protein, 401 aa, Oryza sativa
MAAEGEDAAAARRRAAATDYRKKLLTCRELEARARTARDNLKNAKKDFGKTEDDLKSLQSVGQIIGEVLRPLDSERFIVKASSGPRYVVGCRSKVDKEKLIAGTRVVLDMTTLTIMRTLPREVDPVVYNMLHEDPGNVSYSAVGGLSDQIRELRESIELPLMNPKLFLRVGIKPPKGVLLYGPPGTGKTLLARAIASNIDANFLKIVSSAIIDKYIGESARLIREMFSYAREHQPCIIFMDEIDAIGGRRFSEGTSADREIQRTLMELLNQLDGFDELGKVKMIMATNRPDVLDPALLRPGRLDRKIEIPLPNEQSRMEVLKIHAAGIAKHGEIDYEAVVKLAEGFNGADLRNVCTEAGMAAIRAERDYVIHEDFMKAVRKLNDAKKLESSAHYSADFGKE

SEQ ID NO: 5300 - DNA, 1347 bp, Oryza sativa
  CDS (1)..(1347)
atggggcagggcaccccgggaggcatgggcaagcagggcggcgcccccggcgaccgcaagcctggcggcgacggcgacaagaaggaccgcaagttcgagccccccgccgccccctcccgcgtcggccgcaagcagcgcaagcagaagggccccgaggcggccgctcgcctccccaacgtcgcccctctctccaagtgccgcctccgcctcctcaagctcgagcgggtcaaggactacctcctcatggaggaggagttcgtcgccgcccaggagcgcctccgccccaccgaggacaagaccgaggaggaccgatccaaggtcgacgacctccgcggcacccccatgagcgtcggatccctcgaggagatcatcgacgagagccatgccatcgtctcctcctccgtcggccccgagtactacgtcggcatcctctccttcgtcgacaaggaccagctcgagcccggctgctccatcctcatgcacaacaaggttctgtctgtggtcggaattttgcaagatgaagttgatcctatggtttctgtgatgaaagtggagaaagctccgctggaatcctatgctgacattggtgggctagatgctcagatccaagaaatcaaagaggcagttgagcttcctttgacccatcctgagctatatgaagacattggcatcaggccacccaagggagtcatattatacggagaacctggaacagggaagacactacttgccaaggctgttgctaactccacatccgcaactttcttgcgtgttgttggaagtgagcttattcaaaagtatcttggtgatggtcccaaactagtcagggaactgttcagagttgctgatgagctttctccctcaatagtctttatcgatgagattgatgctgttggaacaaagaggtacgatgctcattcaggaggggagcgtgagattcagagaactatgttggagcttcttaaccagttagatggttttgactctcgtggtgatgtcaaagttatactagcaacaaatcgcatcgaaagtcttgatccagcattgctacgccctggtcgcatagatcggaagatagaatttcctctgccagatattaaaactaggcggcgcatcttccagatacacacatctaagatgacattggcagatgatgtgaacctggaagagtttgtcatgaccaaggatgagttttccggtgctgatatcaaagcaatatgtactgaagctggacttcttgctttgagagaacgccgaatgaaggtgacacatgctgacttcaagaaggcaaaggagaaggtgatgttcaagaagaaggaaggtgtgccggagggtctttacatgtga

SEQ ID NO: 5301 - protein, 448 aa, Oryza sativa
MGQGTPGGMGKQGGAPGDRKPGGDGDKKDRKFEPPAAPSRVGRKQRKQKGPEAAARLPNVAPLSKCRLRLLKLERVKDYLLMEEEFVAAQERLRPTEDKTEEDRSKVDDLRGTPMSVGSLEEIIDESHAIVSSSVGPEYYVGILSFVDKDQLEPGCSILMHNKVLSVVGILQDEVDPMVSVMKVEKAPLESYADIGGLDAQIQEIKEAVELPLTHPELYEDIGIRPPKGVILYGEPGTGKTLLAKAVANSTSATFLRVVGSELIQKYLGDGPKLVRELFRVADELSPSIVFIDEIDAVGTKRYDAHSGGEREIQRTMLELLNQLDGFDSRGDVKVILATNRIESLDPALLRPGRIDRKIEFPLPDIKTRRRIFQIHTSKMTLADDVNLEEFVMTKDEFSGADIKAICTEAGLLALRERRMKVTHADFKKAKEKVMFKKKEGVPEGLYM

SEQ ID NO: 5302 - DNA, 1347 bp, Oryza sativa
  CDS (1)..(1347)
atggcgctccgaccaccgcggccgtgtccggccggcgtgcagcagcggcagcacgacgtcgacggcgccggcaacgccaagacttccccggaacagaagctcgagttgctggacctgcaggaggaggacgacgagctcatcttcctcgacgccgacgacgaggagggacgccagctgcgcgagaagctggagtcgctggagcgggagttctgcctgctggatgagcagcgggacaacgcgctgttccagattcacgtgctggaagagacggtgcgcttccgcgaggagctcgtcaggcggctgacggcggtcacccccctcgtcgtcgcccagctcgacgaggtcgtcgacgagcaccacgccgtcgtgacgctgggcgacggatgcgagaggaagatgtgcgtcggcgtcgccggctcgctcgaccgcggcctcctcaagccctcggcgaacgtcgcgctgaacggccggtcgctcgcgctcgtcggcgtgcccccctccgacgtcgccgcctgctcggccgcgcggttcctcgtcgcggacgccgacaagccgggcgtcgcctacgacgacatcggcgggtgcgaggcgcagaagcgggaggtgcgcgaggccgtggagctgccgctgacgcacccggagctcttcgccgccgccggcgtcgacccgccgcgcggcgtgctcctgcacggcccgctgggcaccgggaagaccatgctcgccaaggccgtcgcgcgggagacctcggcggcgttcttccgcgtgaacgccgccgagctcgcgcggcacgacgggccgagggtggtgcgcgacctgttccggctcgccagggacatggcgccggccatcgtcttcatcgacgaggtggacgcgatcgcggcggcgcggcaaggcggcgacgacgacgacggcggtgccaggcgccacgtgcagcgcgtgctgattgagctgctcacccagatggacggcttcgacgagtccaccaacgtgcgggtgatcatggcgacgaaccgcgccgacgacctggacccggcgctgctccggccggggcggctggaccgcaaggtcgagttcacggcgcccgagagcccggaggagaagcggctggtgctgcagacgtgcacggcggggatgagcctggacggcgacgtcgacctcgacgccctggcggcgcggcgcgacaagctcagcgccgccgagatcgccgccgtgtgccgcaaggccggcatgcaggccgtgcgcgacaggcggggcgccgtgacggcggacgacttcgacaagggatacctcgccgtcgtcggcaagaagcccggcgacgccgccaccgagttccacttctacaactga

SEQ ID NO: 5303 - protein, 448 aa, Oryza sativa
MALRPPRPCPAGVQQRQHDVDGAGNAKTSPEQKLELLDLQEEDDELIFLDADDEEGRQLREKLESLEREFCLLDEQRDNALFQIHVLEETVRFREELVRRLTAVTPLVVAQLDEVVDEHHAVVTLGDGCERKMCVGVAGSLDRGLLKPSANVALNGRSLALVGVPPSDVAACSAARFLVADADKPGVAYDDIGGCEAQKREVREAVELPLTHPELFAAAGVDPPRGVLLHGPLGTGKTMLAKAVARETSAAFFRVNAAELARHDGPRVVRDLFRLARDMAPAIVFIDEVDAIAAARQGGDDDDGGARRHVQRVLIELLTQMDGFDESTNVRVIMATNRADDLDPALLRPGRLDRKVEFTAPESPEEKRLVLQTCTAGMSLDGDVDLDALAARRDKLSAAEIAAVCRKAGMQAVRDRRGAVTADDFDKGYLAVVGKKPGDAATEFHFYN

SEQ ID NO: 5304 - DNA, 1281 bp, Glycine max
  CDS (1)..(1281)
atggctactgaacatgaagacgatttcaaggatgagaagaatccccgccccctcgacgaggatgacatcgcccttctcaaaacctatggtttggggccttattccacaagcataaaaaaagtcgagaaggaaatcaaagacatggcaaaaaaggtcaatgatttatgtggtatcaaggagtctgatactggtttagctgcaccaagccagtgggatcttgtttctgataaacaaatgatgcaggaggagcagcctcttcaggtagcaaggtgcacaaagatcataaatccaaattcagaagatgccaaatatgttatcaatgtgaagcagattgcaaagtttgtcgttgggctgggtgataaagtttcacctaccgacattgaggaagggatgcgtgttggggttgatagaaacaaatatcagattcaaattccactgcctccaaaaattgaccctagtgttaccatgatgacagttgaagagaagcctgatgtgacatataatgatgttggtggttgtaaggaacagattgaaaaaatgcgagaagttgttgagcttcccatgctccacccagagaaattcgttaagctaggaattgatcctccaaagggtgttctttgctatggtccaccagggactggcaaaacacttttagctagggctgtggctaataggactgatgcttgttttataagagttattggaagtgagctagttcagaaatatgttggtgagggtgctcgaatggttcgtgaactatttcagatggcccgttcaaagaaggcatgcattgtgtttttcgatgaagttgatgcaattgggggtgcacggtttgatgatggtgttggcggtgataatgaggttcagcgcactatgcttgaaattgtgaatcagcttgatgggtttgatgctcgtggaaacatcaaagtcttgatggcaactaacaggcctgacactctggatccagcactactacgacctggacgattggatcgtaaagttgaatttggccttcctgatttagagagtaggactcagatattcaagatacacacaagaaccatgaactgtgaaagggatatccgctttgaacttttagctcggctttgcccaaattctactggagccgatataaggagcgtttgcactgaagctggtatgtatgctattcgagccagaaggaagaccgtgacagagaaagacttccttgacgcagttaataaagtcatcaaaggataccagaagttcagtgcaactccaaagtatatggtctacaactga

SEQ ID NO: 5305 - protein, 426 aa, Glycine max
MATEHEDDFKDEKNPRPLDEDDIALLKTYGLGPYSTSIKKVEKEIKDMAKKVNDLCGIKESDTGLAAPSQWDLVSDKQMMQEEQPLQVARCTKIINPNSEDAKYVINVKQIAKFVVGLGDKVSPTDIEEGMRVGVDRNKYQIQIPLPPKIDPSVTMMTVEEKPDVTYNDVGGCKEQIEKMREVVELPMLHPEKFVKLGIDPPKGVLCYGPPGTGKTLLARAVANRTDACFIRVIGSELVQKYVGEGARMVRELFQMARSKKACIVFFDEVDAIGGARFDDGVGGDNEVQRTMLEIVNQLDGFDARGNIKVLMATNRPDTLDPALLRPGRLDRKVEFGLPDLESRTQIFKIHTRTMNCERDIRFELLARLCPNSTGADIRSVCTEAGMYAIRARRKTVTEKDFLDAVNKVIKGYQKFSATPKYMVYN

SEQ ID NO: 5306 - DNA, 1272 bp, Glycine max
  CDS (1)..(1272)
atgggctcctccgcgatggtgttggacccgaaaccgtcgtcggagccaccgccgttcctcgcgtcgacaaaatccgactacctccaaggcggcttcagcggcagcgacgccacggcctccgacgaggacgacctctacagccgcctcaagaccctgcagcgccagcttgagttcatcgacatccaggaagagtacgtcaaggacgagcagaagaatctcaagcgcgagctcctccgcgcgcaggaggaggtcaagcggatccagtcggtgccgctcgtcatcggccagttcatggaaatggtcgaccagaacaatggcatcgttggatccaccaccggatccaactactacgtcagaatcctcagcaccatcaaccgcgagcttctcaagccctccgcatccgtcgcgctccaccgccactccaacgccctcgtcgacgttcttccaccggaggccgactccagcatctcgctcctcagccagtccgagaagcctgacgtcacttataatgacattggaggatgtgatatccagaaacaggaaatccgcgaggccgtggagctaccccttacgcatcatgaactatacaaacaaattggtattgatcctcctcgtggtgttttactgtatggaccccctggcactggaaaaacaatgcttgccaaagctgttgcgaatcataccactgccgccttcatcagggttgtgggatctgagtttgtgcagaagtatcttggtgagggtccacgaatggttcgtgatgtatttcgtctcgctaaagagaatgcgcctgcaattatatttattgatgaggttgatgcaatagccacggctagatttgatgcccaaactggagctgatagagaagtacagcgtatccttatggaacttttgaatcagatggatggttttgaccaaacagttaatgttaaagttattatggcaactaacagagcagacactttggaccctgctctgttgcgtcctggaaggcttgatcgtaagattgagttccctttgcctgatagacgtcaaaagaggctcgtatttcaggtttgcacagccaagatgaacttgagtgatgaggtagacctggaggattatgtttctcgtcccgacaaaatcagtgctgctgagatatcagctatttgtcaagaagctggaatgcatgctgttcgcaagaatagatatgtcatactgcccaaggacttcgagaagggttacaggacaaacgtgaagaagcctgatactgacttcgaattttacaagtga

SEQ ID NO: 5307 - protein, 423 aa, Glycine max
MGSSAMVLDPKPSSEPPPFLASTKSDYLQGGFSGSDATASDEDDLYSRLKTLQRQLEFIDIQEEYVKDEQKNLKRELLRAQEEVKRIQSVPLVIGQFMEMVDQNNGIVGSTTGSNYYVRILSTINRELLKPSASVALHRHSNALVDVLPPEADSSISLLSQSEKPDVTYNDIGGCDIQKQEIREAVELPLTHHELYKQIGIDPPRGVLLYGPPGTGKTMLAKAVANHTTAAFIRVVGSEFVQKYLGEGPRMVRDVFRLAKENAPAIIFIDEVDAIATARFDAQTGADREVQRILMELLNQMDGFDQTVNVKVIMATNRADTLDPALLRPGRLDRKIEFPLPDRRQKRLVFQVCTAKMNLSDEVDLEDYVSRPDKISAAEISAICQEAGMHAVRKNRYVILPKDFEKGYRTNVKKPDTDFEFYK

SEQ ID NO: 5308 - DNA, 1227 bp, Glycine max
  CDS (1)..(1227)
atggtgttggatccgccgcccttcctcccgtcgacaaagtccgcctacctccaaggcggcgacgccacggccttcgatgaggaagatctctacagccgcctcaaatccctagtgcgtcagctcgagttcgtcgacatccaggaggagtatgtgaaggacgaactgaagaatctcaggcgcgagctcctccgcgcgatggaggaggtgaagcggatccagtcggtgccgctcgtcataggccagttcatggagatgatcgaccagaacaacggcatcgttggatccaccgcaggatccaactactacgtcagaatcctcagcactatcaaccgcgaattgctcaagccttctgcttccgtcgcgctccaccgccactccaacgcgctcgtcgaggtgctgccgccggaggccgactccagcatctcgctcctcagccagtccgagaagcctgacgtcacttataatgacattggaggatgtgatatccagaaacaggaaatccgtgaggctgtggagctaccccttacacatcatgaactatacaaacaaattggtattgatcctcctcgtggtgttttactgtatggaccccctggcactggcaaaacaatgcttgccaaagctgttgctaatcataccactgccgccttcatcagggttgtaggatctgagtttgtgcaaaagtatcttggtgagggtccacgaatggttcgtgatgtatttcgtctcgctaaagagaatgcgcctgctattatatttattgatgaggttgatgcaatagccactgctagatttgatgcccaaactggagctgatagagaagtacagcgtatccttatggaacttttgaatcagatggatggttttgaccaaacagttaatgttaaagttattatggcaactaacagagcagacactttggaccctgctctgttgcgtcctggaaggcttgatcgtaaaattgagttccctttgcctgatagacgtcaaaagaggcttgtatttcaggtttgcacagccaagatgaacttgagtgatgaggtagatctggaggattatgtttctcgccctgacaaaatcagtgctgctgagatatcagctatttgtcaagaagctggaatgcatgctgttcgcaagaatagatatgtcatactgccaaaggacttcgagaagggttataggacaaacgtgaagaagcctgatactaacttcgaattttacaagtga

SEQ ID NO: 5309 - protein, 408 aa, Glycine max
MVLDPPPFLPSTKSAYLQGGDATAFDEEDLYSRLKSLVRQLEFVDIQEEYVKDELKNLRRELLRAMEEVKRIQSVPLVIGQFMEMIDQNNGIVGSTAGSNYYVRILSTINRELLKPSASVALHRHSNALVEVLPPEADSSISLLSQSEKPDVTYNDIGGCDIQKQEIREAVELPLTHHELYKQIGIDPPRGVLLYGPPGTGKTMLAKAVANHTTAAFIRVVGSEFVQKYLGEGPRMVRDVFRLAKENAPAIIFIDEVDAIATARFDAQTGADREVQRILMELLNQMDGFDQTVNVKVIMATNRADTLDPALLRPGRLDRKIEFPLPDRRQKRLVFQVCTAKMNLSDEVDLEDYVSRPDKISAAEISAICQEAGMHAVRKNRYVILPKDFEKGYRTNVKKPDTNFEFYK

SEQ ID NO: 5310 - DNA, 1341 bp, Glycine max
  CDS (1)..(1341)
atgggtcagggaacaccgggcggtctgaaccggcagggtcttccgggggaccggaagccggacggcggcgacaagaaggagaaaaagttcgagccggcggccccgccggcccgcgtggggcgtaagcagcggaagcagaaggggccggaggcggcggcgcggctgccgacggtgacgccgctgtcgaagtgcaagctgcggctgctgaagctggagcgcataaaggactacctcttgatggaggaggagtttgtggcgaaccaggagaggctgaaaccacaggaggagaaggccgaggaagatagatccaaggtcgatgatctcagaggttcccctatgagcgttggtaacctcgaggaactcatcgacgagaatcatgccatcgtttcgtcctcggtggggcccgagtactatgttggtattttgtctttcgttgataaggatcagctcgaacctggatgcgctattttgatgcataacaaggttctctctgttgttgggcttcttcaagatgaagttgatccaatggtctctgttatgaaggtcgaaaaggcccctttggaatcatatgctgatattggtggtttagatgctcagatacaggaaattaaagaagcagttgagcttcccctgacacatcctgaactgtatgaagacattggtatcaagcctcctaagggagttattttatatggggaaccaggaactgggaagacattgcttgcaaaggctgtggcaaactcaacatcagcaacctttttgcgtgttgttggtagtgaattaatacaaaaatacttgggagatggtccaaagcttgtaagggaacttttccgagttgctgatgatctttccccatctattgtcttcattgatgagatagacgctgttggtactaagaggtatgatgcccactctggtggagaacgtgaaattcagaggactatgttggagttgctgaaccagttagatggttttgattcaagaggagacgtaaaagttattcttgcaaccaacagaattgaaagccttgatccagctttgctgcgacctggtcgaattgacaggaagattgaatttcctctccctgatattaaaacaagaagacgcattttccagatacacacatcaaggatgacattagctgatgatgtcaatttagaagaatttgttatgaccaaggatgagttctctggagctgatataaaagcaatatgtactgaagctggcttacttgctttacgagaacgccgaatgaaggtgacgcatgccgactttaagaaggcaaaggataaagttatgtttaagaagaaagaaggagtgcccgaaggactgtatatgtga

SEQ ID NO: 5311 - protein, 446 aa, Glycine max
MGQGTPGGLNRQGLPGDRKPDGGDKKEKKFEPAAPPARVGRKQRKQKGPEAAARLPTVTPLSKCKLRLLKLERIKDYLLMEEEFVANQERLKPQEEKAEEDRSKVDDLRGSPMSVGNLEELIDENHAIVSSSVGPEYYVGILSFVDKDQLEPGCAILMHNKVLSVVGLLQDEVDPMVSVMKVEKAPLESYADIGGLDAQIQEIKEAVELPLTHPELYEDIGIKPPKGVILYGEPGTGKTLLAKAVANSTSATFLRVVGSELIQKYLGDGPKLVRELFRVADDLSPSIVFIDEIDAVGTKRYDAHSGGEREIQRTMLELLNQLDGFDSRGDVKVILATNRIESLDPALLRPGRIDRKIEFPLPDIKTRRRIFQIHTSRMTLADDVNLEEFVMTKDEFSGADIKAICTEAGLLALRERRMKVTHADFKKAKDKVMFKKKEGVPEGLYM

SEQ ID NO: 5312 - DNA, 1281 bp, Glycine max
  CDS (1)..(1281)
atggcaactgaacatgaagacgatttcaaggatgagaagaatccccgccccctcgacgaggatgacatcgcccttctcaaaacctatggtttggggccttattccaccagcataaaaaaagccgagaaggaaatcaaagaaatggcaaaaaaggtcaatgatttatgtggtatcaaggagtctgatactggtttggctgcaccaagccagtgggatcttgtttctgataaacaaatgatgcaggaggagcagcctcttcaggtagcaaggtgcacaaagatcataaacccgaactcagaagatgccaaatatgtaatcaacgtgaagcagattgcaaagtttgtcgttgggctgggcgacaaagtttcacccaccgacattgaggaagggatgcgtgttggggttgatagaaacaaatatcagattcaaattccactgcctccaaaaattgacccaagtgttaccatgatgacagttgaagagaagcctgatgtgacatataatgatgttggtggttgtaaggagcagattgaaaagatgcgagaagttgttgagcttcccatgctccaccctgagaaattcgttaagctaggaattgatcctccaaagggtgttctttgctatggtccaccagggactggcaaaacacttttagctagggctgtggctaataggactgatgcttgttttataagagttattggaagtgagctagttcagaaatatgttggtgagggtgctcgaatggttcgtgaactatttcagatggcccgctctaagaaggcatgcattgtgttttttgatgaagttgatgcaattgggggtgcacggtttgatgatggtgttggtggtgataatgaggttcagcgcactatgcttgaaattgtgaatcagcttgatgggtttgatgctcgtggaaacatcaaagtcttgatggcaactaacaggcctgacactctggatccagcactactacgacctggacgattggaccgtaaagttgaatttggccttcctgatttagagagtaggactcagatattcaagatacacacaagaaccatgaactgtgaaagggatatccgctttgaacttttagctcggctttgcccaaattctaccggagccgatataaggagcgtttgcactgaagctggtatgtatgctattcgagccagaaggaagaccgtgacagagaaagacttccttgacgcagttaataaagtcatcaaaggataccagaagttcagtgcaactcccaagtatatggtttataactga

SEQ ID NO: 5313 - protein, 426 aa, Glycine max
MATEHEDDFKDEKNPRPLDEDDIALLKTYGLGPYSTSIKKAEKEIKEMAKKVNDLCGIKESDTGLAAPSQWDLVSDKQMMQEEQPLQVARCTKIINPNSEDAKYVINVKQIAKFVVGLGDKVSPTDIEEGMRVGVDRNKYQIQIPLPPKIDPSVTMMTVEEKPDVTYNDVGGCKEQIEKMREVVELPMLHPEKFVKLGIDPPKGVLCYGPPGTGKTLLARAVANRTDACFIRVIGSELVQKYVGEGARMVRELFQMARSKKACIVFFDEVDAIGGARFDDGVGGDNEVQRTMLEIVNQLDGFDARGNIKVLMATNRPDTLDPALLRPGRLDRKVEFGLPDLESRTQIFKIHTRTMNCERDIRFELLARLCPNSTGADIRSVCTEAGMYAIRARRKTVTEKDFLDAVNKVIKGYQKFSATPKYMVYN

SEQ ID NO: 5314 - DNA, 1278 bp, Glycine max
  CDS (1)..(1278)
atggcgagcgccatgttaggggatgctaccacgagctttgaagatggtaagttggcgtctatgaccaccgatgacgtcgtcagagcctctcgtattctcgaaaacgatattcgcattctcaaggaagaggtgcagagatcgaatcgggaatgggaatcgtacaaggagaagatacaagataatgaggagaaagttaaacttaataagcaattgccctacctcgttggtaacattgttgagatattggaaataaatccagaagatgaagcagaagaagatggttccaacattgatcttgactcccaaaggaaaggaaaatgtgttgtgctaaagacatctactcgacagacaatctttcttcctgttgttgggcttgttgaccctgccaagttaaaacctggtgatctggttggtgttaacaaagatagttacttagtcttggatgccctgccttctgagtatgattcacgagttaaggccatggaagttgatgaaaagccaacggaggactacaatgacattggtggtttagagaagcagatccaagaattagttgaagcaattgttttgccaatgacctgcaaggagcggttccaaaaattaggagttcgtccaccgaagggagtgctcttatatggacctccaggaactggaaaaacactaattgcccgtgcttgtgcagcacaaacaaatgccacttttctgaagttggcaggtccacagctggtccagatgtttataggagacggagcaaaacttgtccaggatgcctttcagctggcaaaagagaagtctccatgcattatatttatagatgaaattgatgcaattggaacaaagcgtttcgatagtgaagtaagtggagacagggaggtacagcgaacaatgttagaattgctcaatcagcttgatggttttagtagtgatgaccggattaaggtgattgcagcaacaaaccgtgctgacattcttgatcctgcccttatgcgttctggtcgattggatcgaaaaattgagttcccacacccaactgaagaagcaagagcccgaattctacagatccattctcggaaaatgaatgttcaccccgatgtcaactttgaagaattagctcggtccacagatgatttcaatgcagcacaacttaaagctgtctgtgttgaggctggcatgttggcccttcgccgtgatgcaactgaggtgaaccatgaggactttaatgaaggcatcatccaagtccaagcaaagaagaaagcaagcttgaattattatgcatag

SEQ ID NO: 5315 - protein, 425 aa, Glycine max
MASAMLGDATTSFEDGKLASMTTDDVVRASRILENDIRILKEEVQRSNREWESYKEKIQDNEEKVKLNKQLPYLVGNIVEILEINPEDEAEEDGSNIDLDSQRKGKCVVLKTSTRQTIFLPVVGLVDPAKLKPGDLVGVNKDSYLVLDALPSEYDSRVKAMEVDEKPTEDYNDIGGLEKQIQELVEAIVLPMTCKERFQKLGVRPPKGVLLYGPPGTGKTLIARACAAQTNATFLKLAGPQLVQMFIGDGAKLVQDAFQLAKEKSPCIIFIDEIDAIGTKRFDSEVSGDREVQRTMLELLNQLDGFSSDDRIKVIAATNRADILDPALMRSGRLDRKIEFPHPTEEARARILQIHSRKMNVHPDVNFEELARSTDDFNAAQLKAVCVEAGMLALRRDATEVNHEDFNEGIIQVQAKKKASLNYYA

SEQ ID NO: 5316 - DNA, 1272 bp, Glycine max
  CDS (1)..(1272)
atggcgagcgcgatggtagaggacgcgaacttcgaagatgaccaactagccaatatgaccaccgacgacatcgtcagagcttcacgtcttctcgacaacgagattcgcatcctcaaggaagagttgcagaggaccaatttggaattggaatcgtacaaggacaagatcaaggagaatcaggagaagattaagctcaataagcagttgccctacctcgttggcaacattgttgagatattggaaatgaacccggaagacgaagctgaagaagatggtgccaatattgatcttgactcacaaaggaagggaaagtgtgttgtgctaaagacttctactcgacagacaatctttctacctgttgttgggcttgttgaccctgacaagttaaaacccggtgatctggttggtgttaacaaggatagttacttaatcttggataccctgccttccgagtatgattctagagttaaggccatggaagttgatgaaaagccaacagaggattacaatgacattggcggattagagaagcagattcaagaattagttgaagccattgttttgcccatgacccacaaggagcggttccaaaagttaggagttcgtcctcccaagggagtgctgttgtatggacctccagggactgggaaaacattgatggctcgtgcctgtgcagcacagacaaatgccacttttctgaaattggctggccctcaactggtccagatgttcattggagatggagcaaaacttgttcgtgacgcctttcaactagcaaaagaaaagtcaccatgcattatttttatagatgaaattgatgcaattggaaccaagcgttttgatagtgaagtaagtggagacagagaggtccaacggacaatgttagaattgcttaatcagcttgatggttttagcagtgatgaccggattaaggtgatagcagcaacaaaccgtgcagatattcttgaccctgcccttatgcgttctggtcgattagatcgtaaaattgagtttccacacccaagtgaagaagcaagagctcgaattctacagatccattcgaggaagatgaatgttcacccagatgtcaactttgaagaacttgctcggtccacagatgatttcaatggagctcaactgaaggctgtttgtgttgaggctggcatgttggctctacgccgtgatgcaactgaggtgaaccatgaggactttaatgaaggtattattcaagtccaagcaaagaagaaagcaagcctcaattattatgcatag

SEQ ID NO: 5317 - protein, 423 aa, Glycine max
MASAMVEDANFEDDQLANMTTDDIVRASRLLDNEIRILKEELQRTNLELESYKDKIKENQEKIKLNKQLPYLVGNIVEILEMNPEDEAEEDGANIDLDSQRKGKCVVLKTSTRQTIFLPVVGLVDPDKLKPGDLVGVNKDSYLILDTLPSEYDSRVKAMEVDEKPTEDYNDIGGLEKQIQELVEAIVLPMTHKERFQKLGVRPPKGVLLYGPPGTGKTLMARACAAQTNATFLKLAGPQLVQMFIGDGAKLVRDAFQLAKEKSPCIIFIDEIDAIGTKRFDSEVSGDREVQRTMLELLNQLDGFSSDDRIKVIAATNRADILDPALMRSGRLDRKIEFPHPSEEARARILQIHSRKMNVHPDVNFEELARSTDDFNGAQLKAVCVEAGMLALRRDATEVNHEDFNEGIIQVQAKKKASLNYYA

SEQ ID NO: 5318 - DNA, 1197 bp, Glycine max
  CDS (1)..(1197)
atggctgaagcagaggatgccgtaagacgccgtaatgcggtcgccgagtatcggaagaaacttctccagcacaaggaattggaatccagagtccgatccgtcagggagaatttgcgagcttcaaagaaagagttcaataaaacagaagatgatttgaaatctcttcaaagtgttgggcagattattggcgaagttctcaggcctcttgacaatgaacgcctgattgttaaagcaagcagtggtcccaggtatgtggttggttgccgcagtaaagtggataaggaaaaattgacttcagggacaagggtggttcttgatatgacaacactcaccataatgcgagctcttcctcgagaagttgatccagtagtttacaatatgttgcatgaagatcctggtaatatcagctactcagctgttggtggcttatctgatcagatcagggaattgagggagtcaattgaactgcctctaatgaatcctgagctcttccttcgagttggaattaaacctccaaagggtgttctcctttacgggcctcctggtactggtaaaacattgttagctagggcaattgcaagtaatatagatgcaaatttcctaaaggttgtttcaagtgccataattgataagtacattggagaaagtgccaggttaatcagagagatgtttggttatgcacgtgatcaccagccttgcatcatttttatggatgagatcgatgccattggaggtcgccgtttcagtgagggaacaagtgcagatcgtgagattcagagaacgctaatggagctgcttaatcaacttgatggatttgatcaacttggaaaggttaaaatgataatggcaacaaaccgacctgatgtacttgaccctgctctcctgcgtcctgggagattggatagaaaaatagaaatccctctgcctaatgaacaatcaaggatggaaattcttaagattcatgctgctggtatcgctaagcatggtgaaatagactatgaagctgttgtgaagcttgcagagggatttaatggggctgatcttcgaaatgtctgcacagaagctggaatggcagcaattcgtgcagagcgtgattatgtgatccatgaagattttatgaaggctgttaggaaactgaacgaggcaaagaaacttgaatccagtgcgcactacagtgctgattttggtaaagactag

SEQ ID NO: 5319 - protein, 398 aa, Glycine max
MAEAEDAVRRRNAVAEYRKKLLQHKELESRVRSVRENLRASKKEFNKTEDDLKSLQSVGQIIGEVLRPLDNERLIVKASSGPRYVVGCRSKVDKEKLTSGTRVVLDMTTLTIMRALPREVDPVVYNMLHEDPGNISYSAVGGLSDQIRELRESIELPLMNPELFLRVGIKPPKGVLLYGPPGTGKTLLARAIASNIDANFLKVVSSAIIDKYIGESARLIREMFGYARDHQPCIIFMDEIDAIGGRRFSEGTSADREIQRTLMELLNQLDGFDQLGKVKMIMATNRPDVLDPALLRPGRLDRKIEIPLPNEQSRMEILKIHAAGIAKHGEIDYEAVVKLAEGFNGADLRNVCTEAGMAAIRAERDYVIHEDFMKAVRKLNEAKKLESSAHYSADFGKD

SEQ ID NO: 5320 - DNA, 1257 bp, Glycine max
  CDS (1)..(1257)
atggctctggtcggagttgaagtgaagcatgcggcggagggcgcaccggaggagaattgctccgccaagcccaccaagcagggcgagggcctccgccactactattctcacaacatccacgagcatcagctccttctccgtcaaaagacgcataacctcaaccgtcttgaggctcagagaaacgagctcaattccagggtgaggatgctgcgcgaagaattacagcttttgcaggaaccaggctcttatgttggtgaagttgtcaaagtcatgggcaagaacaaagtccttgtcaaggtccacccagaaggaaaatatgtcgttgatattgacaaaagtattgacattacaaagattactccatccactagagttgcacttcgcaacgacagttatgttcttcacttagttctgccaagtaaagttgatccattggtcaatctgatgaaagttgagaaggttcccgattctacttacgacatgattggtggtttagaccagcaaattaaagaaataaaagaggtcattgagttaccaatcaaacatcctgagctgtttgaaagtcttggaattgcacaaccaaagggtgtcctgctctatgggccacctggtacaggaaaaacattgttggctagggcagtggctcatcatactgactgtacattcatcagggtgtctggttctgaattagttcagaaatacattggagaaggttctagaatggtcagggaactttttgttatggccagggaacatgctccatcaattatcttcatggacgaaattgacagtattggatctgctcggatggaatctggaagtggcaatggtgatagtgaggtacagcgtactatgctggaacttctcaatcagttggatggatttgaagcttcaaacaagatcaaggttttgatggccacaaatcggattgatatcctggatcaagccctccttagacctggacggattgaccggaagattgaatttccaaaccctaatgaagagtctcggctggatattttgaaaatccattcaagaagaatgaatttaatgcgtggcattgatctgaagaagattgccgagaagatgaatggagcatctggtgctgaacttaaggctgtttgcaccgaagctggaatgtttgcattgagggagcggagggtacacgtgactcaggaggattttgagatggctgtggccaaggtgatgaaaaaggagactgaaaaaaacatgtcattgcggaagttgtggaagtga

SEQ ID NO: 5321 - protein, 418 aa, Glycine max
MALVGVEVKHAAEGAPEENCSAKPTKQGEGLRHYYSHNIHEHQLLLRQKTHNLNRLEAQRNELNSRVRMLREELQLLQEPGSYVGEVVKVMGKNKVLVKVHPEGKYVVDIDKSIDITKITPSTRVALRNDSYVLHLVLPSKVDPLVNLMKVEKVPDSTYDMIGGLDQQIKEIKEVIELPIKHPELFESLGIAQPKGVLLYGPPGTGKTLLARAVAHHTDCTFIRVSGSELVQKYIGEGSRMVRELFVMAREHAPSIIFMDEIDSIGSARMESGSGNGDSEVQRTMLELLNQLDGFEASNKIKVLMATNRIDILDQALLRPGRIDRKIEFPNPNEESRLDILKIHSRRMNLMRGIDLKKIAEKMNGASGAELKAVCTEAGMFALRERRVHVTQEDFEMAVAKVMKKETEKNMSLRKLWK

SEQ ID NO: 5322 - DNA, 1281 bp, Glycine max
  CDS (1)..(1281)
atggcaattgaacacgaagacgatctcaaagacgagaagaaccctcgacccctcgacgaggatgacatcgccctcctcaaaacctacggtttgggaccttattccacaagcataaaaaaggcggagaaggaaatcaaagatatggccaagaaagtgaatgacttatgtggtatcaaggagtctgatactggattagcagcaccaagccagtgggatcttgtttctgataagcaaatgatgcaggaagagcagcctcttcaggtggcacgatgcacaaagatcataaatccaaactctgaagatgccaaatatgttatcaatgtgaagcagatagcaaagtttgttgttgggctaggagacaaggtttcccccactgacattgaggaagggatgcgtgttggggttgatagaaacaaatatcagattcagattcctttgcctccgaaaattgatccaagtgtaaccatgatgacggttgaagagaagccagatgtgacatataatgatgttggcggttgtaaggagcagattgagaagatgcgtgaagttgttgaacttcccatgcttcatccagagaaatttgtcaagcttgggattgatcctccaaagggtgttctttgttatggtcccccaggaactgggaaaacacttttagccagggctgtggctaataggactgatgcttgttttataagggttattggaagtgagctagttcagaaatatgtcggtgagggggctaggatggttcgtgaactatttcagatggctcgttcaaagaaggcatgcattgtgttttttgatgaagttgatgcaattggaggtgcacgatttgatgatggtgttggtggtgacaatgaggttcagcgcaccatgcttgaaattgtgaatcagcttgatgggtttgatgctcggggaaacatcaaagttttgatggcaactaacaggcctgacactctagatcctgcactactacggcctgggcggttggaccgtaaagttgaattcggccttcctgacttagagagtaggactcagatattcaagatacacacaagaaccatgaactgcgaaagggatatccgatttgaacttctggctcggctttgcccaaattccactggagctgatataaggagtgtatgcacagaagccggtatgtatgctatccgtgcccggaggaagactgtaacagagaaagacttccttgatgcagtaaataaagtcatcaaaggataccagaagttcagtgcaactcccaagtatatggtctataactga

SEQ ID NO: 5323 - protein, 426 aa, Glycine max
MAIEHEDDLKDEKNPRPLDEDDIALLKTYGLGPYSTSIKKAEKEIKDMAKKVNDLCGIKESDTGLAAPSQWDLVSDKQMMQEEQPLQVARCTKIINPNSEDAKYVINVKQIAKFVVGLGDKVSPTDIEEGMRVGVDRNKYQIQIPLPPKIDPSVTMMTVEEKPDVTYNDVGGCKEQIEKMREVVELPMLHPEKFVKLGIDPPKGVLCYGPPGTGKTLLARAVANRTDACFIRVIGSELVQKYVGEGARMVRELFQMARSKKACIVFFDEVDAIGGARFDDGVGGDNEVQRTMLEIVNQLDGFDARGNIKVLMATNRPDTLDPALLRPGRLDRKVEFGLPDLESRTQIFKIHTRTMNCERDIRFELLARLCPNSTGADIRSVCTEAGMYAIRARRKTVTEKDFLDAVNKVIKGYQKFSATPKYMVYN

SEQ ID NO: 5324 - DNA, 1200 bp, Glycine max
  CDS (1)..(1200)
atgacggatgcagctgaagacgctacacgacgccgtaatgcggtggccgagtaccgcaagaaacttcttcaacacaaggaattggaatccagagtacgatccgtcagagaaaatttgcgtgcctcgaagaaagagttcaacaaaactgaagatgatttgaagtctcttcaaagcgttggacagatcattggcgaagttcttaggcctctcgacaatgaacgcttgattgttaaggcaagcagcggacctaggtatgtggttggctgccgcagtaaagtagataaggaaaaactgaccgctggtacaagagtggttcttgatatgaccacgctaaccataatgcgagctcttccacgtgaagttgatccagtagtttacaatatgcttcatgaggatcctggtaatatcagttactctgctgttggtggtttatctgatcagataagggaattgagggaatcaattgaattacctctgatgaatcctgagctcttcattcgagttggaattaaacctcctaagggtgttctcctttatgggcctcctggtactggtaaaacattgttagctagggcaattgccagtaacatagaagctaacttcttgaaggttgtttcaagtgcaataattgataaatacattggagaaagtgccaggttaattcgagaaatgtttggctatgcacgtgatcaccagccttgcatcatttttatggatgagatcgatgccattggtggtcgtcgtttcagtgagggaacaagtgctgatcgtgagattcagagaacactaatggagttgcttaatcaacttgatgggtttgatcaacttgggaaggttaaaatgataatggcaacaaaccgtcctgatgtactggatcctgctcttctgcgtcctggaagattagatagaaaaatagaaattccattgccaaatgaacaatcaaggatggaaattcttaagattcatgctgctgggattgctaagcacggtgaaatagattacgaagctgttgtgaaacttgctgagggctttaatggagctgatcttcgaaatgtgtgcacggaagctggaatggcagcaattcgtgcagaacgcgattatgtgatccatgaagattttatgaaggctgttagaaaactgaatgatgcaaagaaacttgaatccagtgctcactacagtgctgattttggcaaagactaa

SEQ ID NO: 5325 - protein, 399 aa, Glycine max
MTDAAEDATRRRNAVAEYRKKLLQHKELESRVRSVRENLRASKKEFNKTEDDLKSLQSVGQIIGEVLRPLDNERLIVKASSGPRYVVGCRSKVDKEKLTAGTRVVLDMTTLTIMRALPREVDPVVYNMLHEDPGNISYSAVGGLSDQIRELRESIELPLMNPELFIRVGIKPPKGVLLYGPPGTGKTLLARAIASNIEANFLKVVSSAIIDKYIGESARLIREMFGYARDHQPCIIFMDEIDAIGGRRFSEGTSADREIQRTLMELLNQLDGFDQLGKVKMIMATNRPDVLDPALLRPGRLDRKIEIPLPNEQSRMEILKIHAAGIAKHGEIDYEAVVKLAEGFNGADLRNVCTEAGMAAIRAERDYVIHEDFMKAVRKLNDAKKLESSAHYSADFGKD

SEQ ID NO: 5326 - DNA, 1272 bp, Glycine max
  CDS (1)..(1272)
atggcgagcgcgatggttgaggacgccaacttcgaagatgaccagctcgccaatatgaccaccgacgacgtcgtcagagcttctcgtcttctcgacaacgagattcgcatcctcaaagaagagttgcagaggaccaatttggagttggaatcgtacaaggacaagatcaaggagaatcaggagaagattaagctcaataagcagttgccctacctcgttgggaacatcgttgagatattggaaatgaacccagaagacgaagctgaagaagatggtgccaatattgatcttgactcacaaaggaagggaaagtgtgttgtgctaaagacttctactcgacagacaatctttctacctgttgttgggcttgttgaccctgacaagttaaaacctggtgatctggttggtgttaacaaggatagttacttaatcttggataccttgccttctgagtatgattctagagttaaggccatggaagttgatgaaaagccaaccgaggactacaatgacattggtggattagagaagcagattcaagaattagttgaagctattgttttgcccatgacccacaaggagcgattccaaaagttaggagttcgtcctcccaagggagtgctgttatatggacctccggggactgggaaaacattgatggcccgtgcctgtgcagcacagacaaatgccacttttctgaaattggcaggccctcaactggtccagatgttcataggagatggagcaaaacttgttcgtgatgcctttcaactagcaaaagagaagtcaccatgcattatttttatagatgaaattgatgcaattggtacaaagcgttttgatagtgaagtaagtggagacagagaggtacaacgaactatgttagaattgcttaatcagcttgatggttttagcagtgatgaccggatcaaggtgatagcagcaactaaccgtgcagatattcttgatcctgccctgatgcgttctggtcgtttggatcgtaaaattgagtttccacacccaagtgaagaagcaagagctcgaattctacagattcattcaaggaagatgaatgttcacccagatgtcaactttgaagaacttgcccggtccacagatgatttcaatggcgcacaactgaaggctgtctgtgttgaggctggcatgttggctctacgccgtgatgcaactgaggtgaaccacgaggattttaatgaaggtattattcaagtccaagcaaagaagaaagcaagtctgaactattatgcatag

SEQ ID NO: 5327 - protein, 423 aa, Glycine max
MASAMVEDANFEDDQLANMTTDDVVRASRLLDNEIRILKEELQRTNLELESYKDKIKENQEKIKLNKQLPYLVGNIVEILEMNPEDEAEEDGANIDLDSQRKGKCVVLKTSTRQTIFLPVVGLVDPDKLKPGDLVGVNKDSYLILDTLPSEYDSRVKAMEVDEKPTEDYNDIGGLEKQIQELVEAIVLPMTHKERFQKLGVRPPKGVLLYGPPGTGKTLMARACAAQTNATFLKLAGPQLVQMFIGDGAKLVRDAFQLAKEKSPCIIFIDEIDAIGTKRFDSEVSGDREVQRTMLELLNQLDGFSSDDRIKVIAATNRADILDPALMRSGRLDRKIEFPHPSEEARARILQIHSRKMNVHPDVNFEELARSTDDFNGAQLKAVCVEAGMLALRRDATEVNHEDFNEGIIQVQAKKKASLNYYA

SEQ ID NO: 5328 - DNA, 1332 bp, Glycine max
  CDS (1)..(1332)
atgggtcagggaactccgggcggcatgaaccggcagggcgaccggaagccggacggcggcgacaagaaggagaagaagttcgagccggcggcgccgccagcacgcgtggggcggaaacagcggaagcagaagggcccggaggcggcggcgcggctgccgacggtgactccggtgacgaagtgcaagctgcggctgctgaagctggagcggatcaaggactacctactgatggaggaagagttcgtggcgaatcaggagcgactcaagccgcaggaggagaaggccgaggaagacagatccaaggtcgacgatctccgaggctctcccatgagcgtcggaaatctcgaagagctcatcgacgaaaatcacgctattgtttcctcctccgtcgggcctgagtattacgtcggaatcttgtctttcgtcgataaggatcagttggagcctggttgtgctattttgatgcataataaggttctttctgttgttgggcttcttcaagatgaagttgatccaatggtctctgttatgaaggtcgagaaagctcctctggaatcttatgctgacattggtggtttagatgcccaaatacaggaaattaaagaagcagttgagctacccctgacacatcctgaactatatgaagacattggtatcaagcctcctaagggggtcattttatatggagaacctggtactgggaagaccttgcttgcgaaggccgtggcaaactcaacatcagcaacattcttgcgcgttgttggtagtgaattgatacaaaagtacttgggagatggcccaaaacttgtgagagaacttttcagagttgccgatgatctttctccttctattgtattcattgatgaaatcgatgcagttggtacaaaaaggtatgatgctcactcaggtggagaacgtgagattcaaaggaccatgttagagttgctgaaccagttagatggttttgattctagaggagatgtaaaagtgattctggcaaccaacagaattgaaagtcttgatccagctttgctacggcctggtcgaattgacaggaagatagaatttcctcttcctgatatcaaaacaaggagacgcatctttcagatacacacatcgaggatgacattagctgatgatgtcaacttggaagaatttgttatgactaaagatgaattctctggagctgatataaaggcaatatgtactgaagccggtttacttgctctacgagaacgccgaatgaaggtgactcatgccgactttaagaaggccaaggataaagtgatgtttaagaagaaagaaggggtgcctgaagggctgtatatgtga

SEQ ID NO: 5329 - protein, 443 aa, Glycine max
MGQGTPGGMNRQGDRKPDGGDKKEKKFEPAAPPARVGRKQRKQKGPEAAARLPTVTPVTKCKLRLLKLERIKDYLLMEEEFVANQERLKPQEEKAEEDRSKVDDLRGSPMSVGNLEELIDENHAIVSSSVGPEYYVGILSFVDKDQLEPGCAILMHNKVLSVVGLLQDEVDPMVSVMKVEKAPLESYADIGGLDAQIQEIKEAVELPLTHPELYEDIGIKPPKGVILYGEPGTGKTLLAKAVANSTSATFLRVVGSELIQKYLGDGPKLVRELFRVADDLSPSIVFIDEIDAVGTKRYDAHSGGEREIQRTMLELLNQLDGFDSRGDVKVILATNRIESLDPALLRPGRIDRKIEFPLPDIKTRRRIFQIHTSRMTLADDVNLEEFVMTKDEFSGADIKAICTEAGLLALRERRMKVTHADFKKAKDKVMFKKKEGVPEGLYM

SEQ ID NO: 5330 - DNA, 1257 bp, Glycine max
  CDS (1)..(1257)
atggctcttgtaggagttgaactgaagcatgcggcggagggcgtaccggaggcgaattgctccgccaagcccaccaagcagggcgagggcctccgccactactattctctcaacatccacgagcatcagctccttcttcgccaaaagactcataacctcaaccgtctcgaggctcagagaaacgacctcaattctagggtgaggatgctgcgcgaagaattacagcttctgcaggaacccggctcttatgtcggtgaagttgtcaaagtaatgggcaagaacaaagtccttgtcaaggtccacccagaaggaaaatatgttgttgacattgacaaaaatattgacattacaaagattactccatccactagagttgcactccgcaacgacagttatgttcttcacttagttctgccaagtaaagttgatccattggtcaatctgatgaaagttgagaaagttcccgattctacatatgacatgattggtggtttagaccagcaaattaaagaaataaaagaggtcattgagctaccaatcaaacatcctgagctgtttgaaagtcttggaattgcacaaccaaagggtgtcctgctctatgggccacctggtacaggtaaaacattgttggctagggcagtggctcatcatactgactgtacattcatcagggtgtctggttctgagttagttcagaaatacattggagaaggttctagaatggtcagggaactttttgttatggccagggaacatgctccatcaattatcttcatggatgaaattgacagtattggatctgctcggatggaatctggaagtggcaacggtgatagtgaggtacagcgtactatgctggaacttctcaaccagttggatggatttgaagcttcaaataagatcaaggttttgatggccaccaatcggattgatatcctggatcaagccctccttagaccaggacggatagaccggaaaattgaatttccaaaccctaatgaagagtctcggctggatattttgaaaatccattctagaagaatgaatttaatgcgtggcattgatttgaagaagattgccgagaagatgaatggagcatctggtgctgaacttaaggctgtttgcactgaagctggaatgtttgctttgagggagcggagggtacacgtgactcaggaggattttgagatggccgtggcgaaggtgatgaaaaaggagactgaaaaaaacatgtcattgcggaagttgtggaagtga

SEQ ID NO: 5331 - protein, 418 aa, Glycine max
MALVGVELKHAAEGVPEANCSAKPTKQGEGLRHYYSLNIHEHQLLLRQKTHNLNRLEAQRNDLNSRVRMLREELQLLQEPGSYVGEVVKVMGKNKVLVKVHPEGKYVVDIDKNIDITKITPSTRVALRNDSYVLHLVLPSKVDPLVNLMKVEKVPDSTYDMIGGLDQQIKEIKEVIELPIKHPELFESLGIAQPKGVLLYGPPGTGKTLLARAVAHHTDCTFIRVSGSELVQKYIGEGSRMVRELFVMAREHAPSIIFMDEIDSIGSARMESGSGNGDSEVQRTMLELLNQLDGFEASNKIKVLMATNRIDILDQALLRPGRIDRKIEFPNPNEESRLDILKIHSRRMNLMRGIDLKKIAEKMNGASGAELKAVCTEAGMFALRERRVHVTQEDFEMAVAKVMKKETEKNMSLRKLWK

SEQ ID NO: 5332 - DNA, 1341 bp, Glycine max
  CDS (1)..(1341)
atgggtcagggaacaccgggcggtctgaaccggcagggtcttccgggggaccggaagccggacggcggcgacaagaaggagaagaagttcgagccggcggcgccgccggcccgcgtgggccgtaagcagcgtaagcagaagggcccggaggcggcggcgcggctgccgacggtgacgccgctgtcgaagtgcaagctaaggctgctgaagctggagcgcataaaggactacctcttgatggaggaggagttcgtggcgaaccaggagaggctgaagccgcaggaggagaaggccgaggaagacagatccaaggtcgatgatctccgaggttctcctatgagcgttggtaacctagaggaactcattgacgagagtcatgccatagtttcgtcctcggtggggcccgagtactatgttggtatcttgtctttcgtcgataaggatcagctcgagcctggatgcgctattttgatgcataacaaggttctctctgttgttgggcttcttcaagatgaagttgatccaatggtctctgttatgaaggttgaaaaggcacctttggaatcatatgctgatattggtggtttagatgctcagatacaggaaattaaagaagcagtcgaacttcccctgacgcatcctgaactgtatgaagacattggtatcaagcctcctaagggagtcattttatacggcgaacctggaactgggaagacgttgctagctaaggctgtggcaaactcgacatcagcaacctttttacgtgttgttggtagtgaattaatacaaaaatacttgggagatggtccaaaacttgtaagggaacttttccgagttgctgatgatctttccccatctattgtcttcattgatgaaattgatgccgttggtacaaagaggtatgatgcccactcaggtggagaacgtgaaattcagaggactatgttggagttgctgaaccagttagatggtttcgattcaagaggtgatgttaaagtgattcttgcaaccaacagaattgaaagccttgatccagccctgctgcgacctggtcgaattgacaggaagattgaatttcctctccctgatatcaaaacaagaagacgcattttccagatacatacttcaaggatgacattagctgatgatgtcaacttagaagaatttgttatgactaaggatgagttctctggagctgatataaaagcaatatgtactgaagctggcttacttgctttacgagaacgccggatgaaggtgacgcatgccgacttcaagaaggcaaaggataaggttatgtttaagaagaaagaaggggtgccagaaggactgtatatgtga

SEQ ID NO: 5333 - protein, 446 aa, Glycine max
MGQGTPGGLNRQGLPGDRKPDGGDKKEKKFEPAAPPARVGRKQRKQKGPEAAARLPTVTPLSKCKLRLLKLERIKDYLLMEEEFVANQERLKPQEEKAEEDRSKVDDLRGSPMSVGNLEELIDESHAIVSSSVGPEYYVGILSFVDKDQLEPGCAILMHNKVLSVVGLLQDEVDPMVSVMKVEKAPLESYADIGGLDAQIQEIKEAVELPLTHPELYEDIGIKPPKGVILYGEPGTGKTLLAKAVANSTSATFLRVVGSELIQKYLGDGPKLVRELFRVADDLSPSIVFIDEIDAVGTKRYDAHSGGEREIQRTMLELLNQLDGFDSRGDVKVILATNRIESLDPALLRPGRIDRKIEFPLPDIKTRRRIFQIHTSRMTLADDVNLEEFVMTKDEFSGADIKAICTEAGLLALRERRMKVTHADFKKAKDKVMFKKKEGVPEGLYM

SEQ ID NO: 5334 - DNA, 1332 bp, Glycine max
  CDS (1)..(1332)
atgggtcagggaactccgggcggcatgaaccggcagggcgaccggaagccggacggcggcgacaagaaggagaagaagttcgagccgtcggctccgccggcgcgcgtggggcggaaacagcggaagcagaaaggtccggaggcggcggcgcggttgccgacagtgactccggtgacgaagtgcaaactgcggcttctgaagctggagcggatcaaggactaccttctgatggaggaggagttcgtggcgaatcaggagcgactcaagccgcaggaggagaaggccgaggaagacagatccaaggtcgatgatctccgaggctctcccatgagcgtcggaaacctcgaagagctcatcgacgagaatcacgctattgtctcctcctccgttgggcctgagtactatgtcggaatcctgtctttcgttgataaggatcagttggagcctggttgtgctattttgatgcataataaggttctttctgttgttgggcttcttcaagatgaagttgatccaatggtctctgtcatgaaggttgagaaggctcctctggaatcttatgctgacattggtggtttagatgcccaaatacaggaaattaaagaagcagttgagctacccctgacgcatcctgaactatatgaagacattggtatcaagcctcctaagggggtcattttatatggagaacctggaactgggaagacattgcttgcgaaggctgtggcaaactcaacatcagcaacattcttgcgtgttgttggtagtgaactgatacaaaagtacttgggagatggcccaaaacttgtaagagaacttttcagagttgctgatgatctttctccttctattgtattcattgatgaaattgatgcagttggtacaaaaaggtatgatgctcactcaggaggagaacgtgaaattcaaaggaccatgctagagttgctgaaccagttagatggttttgattcaagaggagatgtgaaagtgattctggcaaccaacagaattgaaagtcttgatccagctttgctacgacctggtcgaattgacaggaagatagaatttcctcttcctgatatcaaaacaaggagacgcatcttccagatacacacgtcaaggatgacattagctgatgatgtcaacttggaagaatttgttatgactaaagacgaattctccggagctgatataaaggcaatatgtactgaagctggtttacttgctctacgagaacgtcgaatgaaggtgactcatgccgactttaagaaggccaaggataaagtgatgtttaagaagaaagaaggggtgcctgaagggctgtatatgtga

SEQ ID NO: 5335 - protein, 443 aa, Glycine max
MGQGTPGGMNRQGDRKPDGGDKKEKKFEPSAPPARVGRKQRKQKGPEAAARLPTVTPVTKCKLRLLKLERIKDYLLMEEEFVANQERLKPQEEKAEEDRSKVDDLRGSPMSVGNLEELIDENHAIVSSSVGPEYYVGILSFVDKDQLEPGCAILMHNKVLSVVGLLQDEVDPMVSVMKVEKAPLESYADIGGLDAQIQEIKEAVELPLTHPELYEDIGIKPPKGVILYGEPGTGKTLLAKAVANSTSATFLRVVGSELIQKYLGDGPKLVRELFRVADDLSPSIVFIDEIDAVGTKRYDAHSGGEREIQRTMLELLNQLDGFDSRGDVKVILATNRIESLDPALLRPGRIDRKIEFPLPDIKTRRRIFQIHTSRMTLADDVNLEEFVMTKDEFSGADIKAICTEAGLLALRERRMKVTHADFKKAKDKVMFKKKEGVPEGLYM

SEQ ID NO: 5336 - DNA, 1392 bp, Aspergillus fumigatus
  CDS (1)..(1392)
atgggtaatcagcagtcaaacatcggtggaggccccggcggggatgggagagatgacaaggataagaagaaggagaagcccaagtacgaaccaccaccaccacctaccaccaggattgggcggaagaagcgcaaggctgccggccctagcgctgcctcaaaactccccgacatttttcctacgtcacgatgtaaattacgataccttcgaatgcaacgagtccatgaccacctgttgctcgaagaggaatatgtggagaacatggagcgtctgcgtaaggccaaagctcaggcaacgctggactccgtgagccgaggtgacctggatatcatggacaggaatgcggacgaaaggagccgtgtggatgacatgagaggcagccccatgggagttggtaacctggaggagctaattgacgatgaccatgcgattgtctcgagtgctaccggccccgagtactacgtttctatcatgtcatttgtcgacaaggatctgctggagcctggtgccagcatccttctgcatcacaagtctgtatctgtcgtcggtgtgctgacggaagagtccgatcctctggtctcagtcatgaagctcgacaaggcaccaaccgagtcgtacgcagatattggtggtctcgagtcgcagattcaagaagtccgagagtctgtcgagttgcccttgctccacccggaactgtatgaggagatgggtatcaagccgccaaagggcgtcattctctacggtgctccaggtaccggtaaaaccttgcttgccaaggctgttgcaaaccagaccagcgccactttccttcgaatcgtcggaagtgagctgatccagaaatatctgggagatggtcctcggttggtgcgacagattttccaggtcgctgctgagcatgcgccctcgattgtcttcatcgatgaaattgatgccatcggtaccaagcgctacgactctacatctggtggtgaacgagaaatccagcgtactatgttggagcttcttaaccaactggatggtttcgacgaccgtggtgatgtaaaggttattatggccacaaacaagattgagactctggatcctgccttgatccgtcctggtcgtattgaccgaaagattctcttcgaaaacccagacgaaaataccaagaagaagatcttcacccttcacacgtccaagatgtcccttgcggatgacgttgacctcgatgaattcatcaaccagaaagacgatctctctggtgctgatatccgagctatttgcacagaagccggtctgatggcgctgagagagcgccgtatgagggtgcaaatggatgatttccgtgccgcaagggaacggatcatgaagactaagcaggatggcggtcctgtggagggcttgtatttgtaa

SEQ ID NO: 5337 - protein, 463 aa, Aspergillus fumigatus
MGNQQSNIGGGPGGDGRDDKDKKKEKPKYEPPPPPTTRIGRKKRKAAGPSAASKLPDIFPTSRCKLRYLRMQRVHDHLLLEEEYVENMERLRKAKAQATLDSVSRGDLDIMDRNADERSRVDDMRGSPMGVGNLEELIDDDHAIVSSATGPEYYVSIMSFVDKDLLEPGASILLHHKSVSVVGVLTEESDPLVSVMKLDKAPTESYADIGGLESQIQEVRESVELPLLHPELYEEMGIKPPKGVILYGAPGTGKTLLAKAVANQTSATFLRIVGSELIQKYLGDGPRLVRQIFQVAAEHAPSIVFIDEIDAIGTKRYDSTSGGEREIQRTMLELLNQLDGFDDRGDVKVIMATNKIETLDPALIRPGRIDRKILFENPDENTKKKIFTLHTSKMSLADDVDLDEFINQKDDLSGADIRAICTEAGLMALRERRMRVQMDDFRAARERIMKTKQDGGPVEGLYL

SEQ ID NO: 5338 - DNA, 1855 bp, Zea mays
  CDS (96)..(1535)
gggtacccctcgaggggccggccggggcccgggaaaaaaaaaaaaaaaaaaaatcgacacgactctcggcaacggatatctcggctctcgcatcgatgaagaacgtagcaaaatgcgatacctggtgtgaattgcagaatcccgcgaaccatcgagtttttgaacgcaagttgcgcccgaagccttctggcggagggcacgtctgcctgggcgtcacgccaaaagacactaaaaggaaaaaattccaccctcccccactttctcctcaccgggtcacaaagccaaaccctaattcacggccgccggagatgggacaaggttctcccggcgggatgggcaagcagcccggcctcccgggcgaccgcaagcagggagacggcaagaaagagaagaaatatgaaccacccgctgccccttcccgtgtcggccggaagcagaagcggcagaagggctccgaggcggcggcgcggctccccgccgtggcgccgctctccaagtgccgccttcgcctcctcaagctcgaacgcgtcaaggactacctcctcatggaggaggagttcgttgccagccaggaacgcctccgtccccaggaggacaaggccgaggaggaccgatccaaggtcgacgacctccgcggcacccccatgagcgtcggatccctcgaggagattatcgacgagagccacgccatcgtctcctcctctgtcggacccgagtactatgtcagcatcctctcctttgtcgacaaggaccagctcgagccgggatgctccatcctcatgcacaataagattcaagaaattaaagaggctgtgaagcttcccttgactcatcctgagttgtatgaagacattgggatcaggccacccaagggagtcatattatatggcgaacctggaactggaaaaactctactcgccaaggctgttgccaattcaacatctgcgactttcttgcgtgttgtcggtagtgaacttattcaaaagtaccttggggatggtcccaagctagtcagagaattgtttagggtggctgatgaactttctccctcaatagtcttcattgatgagattgacgcagttggaacgaagaggtatgatgctcattcaggaggggagcgtgagattcaaagaactatgttggagctgctgaatcagctagatggttttgactcacgtggagatgttaaagtcattctagcaacaaaccgcattgaaagtcttgatccagccttgcttcggccaggccgtatagaccggaagattgaatttcctctaccagatattaaaactagacgacgcatcttccagatacacacatcgaaaatgacattagctgatgatgtgaacttggaagagtttgttatgaccaaagacgagttttcgggtgctgatattaaggcaatctgcacagaggctggattgcttgccttaagagaacgcagaatgaaggtgacccatgcagatttcaagaaggcaaaggagaaggtgatgtacaagaagaaggaaggtgttccggatggtctctacatgtagccaatctattcatcatgccgaacaagttacccgattgtgtgtgtactagcacatctcttcatcatgggagatatgttaccacaatacttgttgcatactgtgctaagtggtcaggagaaccttgtattaattaattatcctttcattgtctcaaagtaaaaatttcccttgcgctaaaaatatgcatccgttcagcatcaaaaaaaaaaaaaaaaaaaaaaaaactcgagacctcgtgccgtgtgacgtgttggcagcttgatcgcatggtgactattgcgtacacgaaattgcaacttatttgaatgaaaaaattggat

SEQ ID NO: 5339 - protein, 479 aa, Zea mays
MKNVAKCDTWCELQNPANHRVFERKLRPKPSGGGHVCLGVTPKDTKRKKFHPPPLSPHRVTKPNPNSRPPEMGQGSPGGMGKQPGLPGDRKQGDGKKEKKYEPPAAPSRVGRKQKRQKGSEAAARLPAVAPLSKCRLRLLKLERVKDYLLMEEEFVASQERLRPQEDKAEEDRSKVDDLRGTPMSVGSLEEIIDESHAIVSSSVGPEYYVSILSFVDKDQLEPGCSILMHNKIQEIKEAVKLPLTHPELYEDIGIRPPKGVILYGEPGTGKTLLAKAVANSTSATFLRVVGSELIQKYLGDGPKLVRELFRVADELSPSIVFIDEIDAVGTKRYDAHSGGEREIQRTMLELLNQLDGFDSRGDVKVILATNRIESLDPALLRPGRIDRKIEFPLPDIKTRRRIFQIHTSKMTLADDVNLEEFVMTKDEFSGADIKAICTEAGLLALRERRMKVTHADFKKAKEKVMYKKKEGVPDGLYM

SEQ ID NO: 5340 - DNA, 1774 bp, Zea mays
  CDS (124)..(1464)
gttgggtacctcgaggccggccggggctaacctgatccttttcctcacgggaccttccaccctcccccactttctcctcctcaccgagtcacaaagccaaaccctaattcacggccgccggagatgggacaaggttctcccggcgggatgggcaagcagcccggcctcccgggcgaccgcaagcagggagacggcaagaaagagaagaaatatgaaccacccgctgccccttcccgtgtcggccggaagcagaagcggcagaagggctccgaggcggcggcgcggctccccgccgtggcgccgctctcaaagtgccgccttcgcctactcaagctcgaacgcgtcaaggactaccttctcatggaagaggagttcgttgccagccaggagcgcctgcgccccagcgaggataagacggaggaggaccgatccaaggtcgacgacctccgcggcactcccatgaacgtcggatcgctggaggagatcatcgacgagagccatgccatcgtctcctcgtccgtcggtcccgagtactacgtcgggatactttccttcgttgataaggaccagctcgagcctggatgtgccattctgatgcacaacaaggttctgtcagtggttggtattttgcaagacgaagttgatcctatggtttctgtgatgaaagttgaaaaggcacctttggagtcttatgctgacattggtggcttggatgctcaaattcaagaaatcaaagaagcagttgagcttcccttgacacatcctgagctgtatgaagacattgggatcaggccacccaagggagtcatattatatggcgaacctggaacaggaaaaactctactcgccaaggctgttgccaattcaacatctgcgactttcttgcgtgttgtcggtagtgaacttattcaaaagtaccttggggatggtcccaagctagtcagagaattgtttagggtggctgatgaactttctccctcaatagtcttcattgatgagattgacgcagttggaacgaagaggtatgatgctcattcaggaggggagcgtgagattcaaagaactatgttggagctgctgaatcagctagatggttttgactcacgtggagatgttaaagtcattctagcaacaaaccgcattgaaagtcttgatccagccttgcttcggccaggccgtatagaccggaagattgaatttcctctaccagatattaaaactagacgacgcatcttccagatacacacatcgaaaatgacattagctgatgatgtaaacttggaagagtttattatgtcaaaagatgagttttcaggtgctgacatcaaggccatttgtactgaagctggcttgcttgctttgagagaacggcgaatgaaggtgacgcatgcagacttcaagaaggccaaagaaaaggttatgttcaagaagaaagaaggcgtgccggagggcctatatatgtgagactcatcagcagcgctattagtctttgtgagagaactggcgtttgtaatctgcttaaatggtccgaaaatgtttgcttacagcatttattttggttggaaacacacaactcaaacaaatagttatcctattatgagtacttggatatatgaaatggcagcgacgagtcaagatgatgttgaatgttggttgtctgtgcaggcgtggacatgtatgacaagcatcctaggtttcaatcctaggttaatatgataattttattttttttataaaaaaaaaaaaaaaaaaaaaaaaactcgagacctcgtgc

SEQ ID NO: 5341 - protein, 446 aa, Zea mays
MGQGSPGGMGKQPGLPGDRKQGDGKKEKKYEPPAAPSRVGRKQKRQKGSEAAARLPAVAPLSKCRLRLLKLERVKDYLLMEEEFVASQERLRPSEDKTEEDRSKVDDLRGTPMNVGSLEEIIDESHAIVSSSVGPEYYVGILSFVDKDQLEPGCAILMHNKVLSVVGILQDEVDPMVSVMKVEKAPLESYADIGGLDAQIQEIKEAVELPLTHPELYEDIGIRPPKGVILYGEPGTGKTLLAKAVANSTSATFLRVVGSELIQKYLGDGPKLVRELFRVADELSPSIVFIDEIDAVGTKRYDAHSGGEREIQRTMLELLNQLDGFDSRGDVKVILATNRIESLDPALLRPGRIDRKIEFPLPDIKTRRRIFQIHTSKMTLADDVNLEEFIMSKDEFSGADIKAICTEAGLLALRERRMKVTHADFKKAKEKVMFKKKEGVPEGLYM

SEQ ID NO: 5342 - DNA, 1248 bp, Bombyx mori
  CDS (1)..(1248)
atggaagagattggaattattttacccgagaaagatgaccaagtcacagactcaaaaggcttggcgtttgctggtcctcaatcttttgatgaactcgaatctgaagatttatacacaaagtacaagaaactccaaagaatgttagagttcttagaagtacaagaagagtacattaaagatgaacaacgaaacttgaagaaagaatatttgcatgcacaggaagaagtaaagcgcatacagtctgttcctcttgtcattggacagtttcttgaggcagttgatcaaaatacaggcatagttggcagcaccactggctcaaattattatgtccgtattctctcaacaattgatagagaattgttgaagccatctgcttcagttgctctgcataagcattctaatgctctagttgacgtcttgcctcctgaagccgacagctcaatctctatgttgcaagctgatgagaaacctgatgttcaatattcggatattggaggcatggatacacaaaaacaagaaattagagaagctgttgaactccctctcactcatgtagagttgtaccggcaaatcggtattgagcctcctcggggtgtgctcatgtatggaccaccaggttgtggcaaaactatgctggctaaagctgttgcgcatcacactacagctgcattcattcgtgtcgtcggatcagagtttgtacagaagtacttaggagaaggaccccgtatggtgcgggacgttttccgtcttgccaaagagaacagcccagcaatcattttcattgatgaaattgatgccattgctactaaaagatttgatgcccaaactggtgctgacagagaagttcaaaggattttacttgaactcctcaatcaaatggatggttttgatcaaactactaatgttaaagtaataatggcgacaaatcgtgctgatacattggaccctgcgttgctaagacctggccgtctcgacagaaaaatcgagtttccacttccagataggcgtcaaaaacgtttgattttctcgacaatcactaccaagatgaacctttcggatgaagtggatttggaagagttcgtggctcgaccggaccgcgtgtccggcgccgacatcaacgccatctgtcaggaggccggcatgcacgctgtcagggaaaacagatatattgtccttcctaaagatttcgaaaagggttacaagaataacatcaagaaagatgagagcgaatatgaattttataaataa

SEQ ID NO: 5343 - protein, 415 aa, Bombyx mori
MEEIGIILPEKDDQVTDSKGLAFAGPQSFDELESEDLYTKYKKLQRMLEFLEVQEEYIKDEQRNLKKEYLHAQEEVKRIQSVPLVIGQFLEAVDQNTGIVGSTTGSNYYVRILSTIDRELLKPSASVALHKHSNALVDVLPPEADSSISMLQADEKPDVQYSDIGGMDTQKQEIREAVELPLTHVELYRQIGIEPPRGVLMYGPPGCGKTMLAKAVAHHTTAAFIRVVGSEFVQKYLGEGPRMVRDVFRLAKENSPAIIFIDEIDAIATKRFDAQTGADREVQRILLELLNQMDGFDQTTNVKVIMATNRADTLDPALLRPGRLDRKIEFPLPDRRQKRLIFSTITTKMNLSDEVDLEEFVARPDRVSGADINAICQEAGMHAVRENRYIVLPKDFEKGYKNNIKKDESEYEFYK

SEQ ID NO: 5344 - DNA, 1341 bp, Zea mays
  CDS (1)..(1341)
atgggacaaggttctcccggcgggatgggcaagcagcccggcctcccgggcgaccgcaagcagggagacggcaagaaagagaagaaatatgaaccacccgctgccccttcccgtgtcggccggaagcagaagcggcagaagggctccgaggcggcggcgcggctccccgccgtggcgccgctctcaaagtgccgccttcgcctactcaagctcgaacgcgtcaaggactaccttctcatggaagaggagttcgttgccagccaggagcgcctgcgccccagcgaggataagacggaggaggaccgatccaaggtcgacgacctccgcggcactcccatgaacgtcggatcgctggaggagatcatcgacgagagccatgccatcgtctcctcgtccgtcggtcccgagtactacgtcgggatactttccttcgttgataaggaccagctcgagcctggatgtgccattctgatgcacaacaaggttctgtcagtggttggtattttgcaagacgaagttgatcctatggtttctgtgatgaaagttgaaaaggcacctttggagtcttatgctgacattggtggcttggatgctcaaattcaagaaatcaaagaagcagttgaacttcccttaacacatcctgagctatatgaggacattgggatcaggcctccgaagggagttatactatatggggaacctggaacagggaaaactctactcgcaaaggctgttgccaattctacttcagcaacgttcttgcgtgttgttgggagtgaattgatccaaaagtaccttggtgatggtcccaagcttgttagagaattgttcagggtggctgatgatctttctccttcaattgtctttattgatgagattgatgctgttgggacaaagaggtatgatgctcattctggtggtgagcgtgagattcagagaaccatgttggagttgttaaatcagctggatggttttgattcaagaggagatgttaaagttattctagcaacaaatcgtattgaaagtcttgatccagccttgcttcgcccaggtcgaattgacagaaagattgaattccctttacctgatgtcaagactaggcggcgcatcttccagatacacacatcgaaaatgacactggctgatgatgtaaacctagaagagtttattatgtcaaaagatgagttttcaggtgctgacatcaaggccatttgtactgaagctggcttgcttgctttgagagagcggcggatgaaggtaacgcatgcagacttcaagaaggccaaagaaaaggttatgttcaagaagaaagaaggcgtgccggagggcctatatatgtga

SEQ ID NO: 5345 - protein, 446 aa, Zea mays
MGQGSPGGMGKQPGLPGDRKQGDGKKEKKYEPPAAPSRVGRKQKRQKGSEAAARLPAVAPLSKCRLRLLKLERVKDYLLMEEEFVASQERLRPSEDKTEEDRSKVDDLRGTPMNVGSLEEIIDESHAIVSSSVGPEYYVGILSFVDKDQLEPGCAILMHNKVLSVVGILQDEVDPMVSVMKVEKAPLESYADIGGLDAQIQEIKEAVELPLTHPELYEDIGIRPPKGVILYGEPGTGKTLLAKAVANSTSATFLRVVGSELIQKYLGDGPKLVRELFRVADDLSPSIVFIDEIDAVGTKRYDAHSGGEREIQRTMLELLNQLDGFDSRGDVKVILATNRIESLDPALLRPGRIDRKIEFPLPDVKTRRRIFQIHTSKMTLADDVNLEEFIMSKDEFSGADIKAICTEAGLLALRERRMKVTHADFKKAKEKVMFKKKEGVPEGLYM

SEQ ID NO: 5346 - DNA, 1287 bp, Saccharomyces cerevisiae
  CDS (1)..(1287)
atggaggaactaggtattgtgacacctgtcgaaaaggcagtcgaagaaaaaccagccgtcaaatcatacgcatcattgttggctcaactcaatggtacagtcaacaataacagtgccctgtctaatgtgaattctgatatatatttcaaattgaagaaattagaaaaagagtatgaactgctgactttgcaagaagactatattaaggacgaacaacgccatttgaaacgtgaattgaagagagctcaagaagaagtaaagagaatccagtcggttccattagttatcgggcaattcttagaacctattgatcagaacacaggtattgtttctagtaccacaggtatgagttatgtcgttagaatattatcaaccctagaccgtgaactattaaagccatctatgtctgtagctttacatcgtcattcaaatgctttagttgacatcctaccacctgattccgactctagcatatccgtaatgggcgaaaacgaaaaacctgacgtcacttatgcagatgttggtgggttagatatgcaaaagcaagaaatcagggaagccgtagagctgccattagttcaggctgatctatacgagcaaatcggtattgaccctcctaggggtgttctattatatggtccaccaggtaccggtaagacgatgcttgttaaagccgtcgccaatagtacaaaagctgcattcataagagttaatggctccgaatttgttcacaaatatcttggtgaaggtccaagaatggttcgtgacgtctttagactcgccagggaaaatgctccatccattatattcatagatgaggtagattccattgccacaaagcgttttgatgctcaaacgggttccgatcgtgaagtacagcgtatcctgattgagttgttgacacaaatggatggtttcgatcaatccaccaacgttaaagtcatcatggctacaaacagggcagacacattggacccagctttgctgagaccaggcagattagatagaaagattgagtttccctcacttcgtgataggcgtgaacgtcgtttgattttcggtaccattgccagtaagatgtcccttgccccagaagcggacttagactcgcttattattcgtaacgactctctatcaggtgctgttattgcagcgatcatgcaggaagctggtttaagagcagtgaggaaaaacagatatgtcatcttacaaagcgatctggaagaagcttacgccactcaagtcaagacagataataccgtcgataaattcgacttctacaaatga

SEQ ID NO: 5347 - protein, 428 aa, Saccharomyces cerevisiae
MEELGIVTPVEKAVEEKPAVKSYASLLAQLNGTVNNNSALSNVNSDIYFKLKKLEKEYELLTLQEDYIKDEQRHLKRELKRAQEEVKRIQSVPLVIGQFLEPIDQNTGIVSSTTGMSYVVRILSTLDRELLKPSMSVALHRHSNALVDILPPDSDSSISVMGENEKPDVTYADVGGLDMQKQEIREAVELPLVQADLYEQIGIDPPRGVLLYGPPGTGKTMLVKAVANSTKAAFIRVNGSEFVHKYLGEGPRMVRDVFRLARENAPSIIFIDEVDSIATKRFDAQTGSDREVQRILIELLTQMDGFDQSTNVKVIMATNRADTLDPALLRPGRLDRKIEFPSLRDRRERRLIFGTIASKMSLAPEADLDSLIIRNDSLSGAVIAAIMQEAGLRAVRKNRYVILQSDLEEAYATQVKTDNTVDKFDFYK

SEQ ID NO: 5348 - DNA, 1314 bp, Saccharomyces cerevisiae
  CDS (1)..(1314)
atgagtgaagaacaggaccctttattagcaggattgggggaaacgtccggcgacaatcacacccaacagtcacacgaacaacaaccagaacaaccacaggaaacggaagaacatcatgaagaggagccttctagagtggatcctgaacaggaggcccataacaaggccttgaatcaattcaagagaaagctgctagaacacagaaggtatgatgatcaattgaagcagcgccgtcaaaatatacgagatctagagaagttatatgacaagactgaaaacgacataaaagctttgcaaagtattggacaattgattggcgaagtcatgaaggaattatctgaagagaaatatatagtgaaggcctcttcgggcccacgttatattgtcggagttaggaattcggtagatcgctctaaattaaagaaaggggtgagagtcaccttagatatcaccactttgactataatgagaattttgcccagagagacagatccactggtgtataatatgaccagttttgaacaaggtgaaatcacttttgatggtattggtggtttgactgagcaaatcagagaattaagggaggttatagaattaccattgaagaacccagaaattttccagagggtcggtatcaaacctccaaagggtgtgctactatatggtccccctggtactggtaaaactttactagcgaaggcagttgctgctacgattggagccaacttcattttctctccagcgtctggtattgtggataaatacattggtgagtctgctcgtattattagagaaatgtttgcatatgcaaaggaacacgaaccttgcatcatttttatggatgaagtggatgctattggtggtagaagattcagtgaaggtacttcagcagaccgtgaaattcaacgtacgttgatggagttgttgacccagatggatggttttgataatcttggacagactaaaatcatcatggctacgaatagaccagatactttagatcctgctttgttgaggcccggtagactagacaggaaagttgaaatcccattgccaaatgaggccggcagattagaaattttcaaaattcatactgcaaaagtcaaaaaaacaggggaatttgacttcgaggctgctgtaaaaatgagtgatggtttcaatggtgctgatattcgtaactgtgcaactgaagcaggttttttcgccataagagatgaccgtgatcacatcaaccctgatgatttaatgaaagccgtaagaaaagtagctgaagttaagaaattggaaggcactatagaataccaaaaattatga

SEQ ID NO: 5349 - protein, 437 aa, Saccharomyces cerevisiae
MSEEQDPLLAGLGETSGDNHTQQSHEQQPEQPQETEEHHEEEPSRVDPEQEAHNKALNQFKRKLLEHRRYDDQLKQRRQNIRDLEKLYDKTENDIKALQSIGQLIGEVMKELSEEKYIVKASSGPRYIVGVRNSVDRSKLKKGVRVTLDITTLTIMRILPRETDPLVYNMTSFEQGEITFDGIGGLTEQIRELREVIELPLKNPEIFQRVGIKPPKGVLLYGPPGTGKTLLAKAVAATIGANFIFSPASGIVDKYIGESARIIREMFAYAKEHEPCIIFMDEVDAIGGRRFSEGTSADREIQRTLMELLTQMDGFDNLGQTKIIMATNRPDTLDPALLRPGRLDRKVEIPLPNEAGRLEIFKIHTAKVKKTGEFDFEAAVKMSDGFNGADIRNCATEAGFFAIRDDRDHINPDDLMKAVRKVAEVKKLEGTIEYQKL

SEQ ID NO: 5350 - DNA, 1197 bp, Archaeoglobus fulgidus DSM 4304
  CDS (1)..(1197): transl_table=11
atgggcgatagcgaaatacaatacctcctggaaaagttgaagaagctggaggaggattactacaagcttagagagctttatcgcagattggaagacgagaagaagtttatcgaaagcgaaagaataaggtatgaaagagaagtaagaaggctgagaagtgaagttgaaagattacgctcaccgccattactcgtaggtgttgtttcagacatacttgaagacggaagagttgttgtgaagagctcaaccggaccgaagttcgttgtcaacacctcgcagtacatcaatgaggaagaactcaagccgggtgcgagagtcgctttaaaccagcagacgctggcaatagtgaatgtccttccaacatccaaagacccaatggtttacggctttgaggtggaggagaagccagaagttagctacgaggacataggaggtcttgatgtacagattgaggaaatcagagaggctgttgagctgccgctgctgaaaccggagcttttcgcggaagttggcatagagccgcccaagggtgtgctgctctacggtccgccgggtacgggtaaaaccttgctggccaaagcggtcgcaaaccagacgagggcaacgttcatacgtgtggttggcagcgagttcgttcagaagtacatcggagagggagcaaggctggtcagagaggtgttccagctcgcaaaggagaaggcaccttcaataatattcatagatgagcttgatgcaatagctgcgagaaggacaaacagcgataccagcggtgacagggaggttcagaggacgatgatgcagctcttagctgagcttgacggcttcgacccgagaggggatgtgaaggtcatcggtgcgacgaacaggatcgacatactcgacccagcaatccttcgacctggaaggtttgacagaataatagaggttccgctaccaacgttcgaggggaggatacagattttcaagatacacacgaggaagatgaagcttgcggaggacgttgacttcaaggagcttgcgagaatcacggagggtgcgagtggagcggacatcaaggcgatatgcaccgaggcagggatgtttgccatcagagaggagagggcgaaggttacaatgctggacttcaccaaggcgatagagaaggtgctcaagaagacgactccgatacccgatttgaagggagtgatgttcgtttaa

SEQ ID NO: 5351 - protein, 398 aa, Archaeoglobus fulgidus DSM 4304
MGDSEIQYLLEKLKKLEEDYYKLRELYRRLEDEKKFIESERIRYEREVRRLRSEVERLRSPPLLVGVVSDILEDGRVVVKSSTGPKFVVNTSQYINEEELKPGARVALNQQTLAIVNVLPTSKDPMVYGFEVEEKPEVSYEDIGGLDVQIEEIREAVELPLLKPELFAEVGIEPPKGVLLYGPPGTGKTLLAKAVANQTRATFIRVVGSEFVQKYIGEGARLVREVFQLAKEKAPSIIFIDELDAIAARRTNSDTSGDREVQRTMMQLLAELDGFDPRGDVKVIGATNRIDILDPAILRPGRFDRIIEVPLPTFEGRIQIFKIHTRKMKLAEDVDFKELARITEGASGADIKAICTEAGMFAIREERAKVTMLDFTKAIEKVLKKTTPIPDLKGVMFV

SEQ ID NO: 5352 - DNA, 1200 bp, Pyrococcus abyssi GE5
  CDS (1)..(1200): transl_table=11
gtgaatataatgagcggtgacgaagttcaattccacgaaaattacgatgattacataacttacctcaagaggagaataaggcagcttgaactccaagtgagaatgcttgaagctgacaaggagagactcgagagggaattatcgaggcttagatccgaaatgtcgcgattaaggcaaccaccggcattcgctggaaccgtgatagaggtacttgacgatgacagggccatagttcagaactacaacgggccaaggttcgtggttaggatagcgccatggatagagagggacaagcttagaccaggggctagagttgccctggatcagaggacaatggcaatcatagagttgctaccaagctccaaggacccaaccgtcctaggatttgaggttatagagaggcccaatgttacttacaacgacataggcggcctaaagaagcaactgcaagagctaagggaagcgatagagttgccacttaagcacccagagctctttgaggaagtcggtattgatccgccaaagggcgttctcctctatggcccacctggatgtgggaagacattgatggcgaaagctttagcgcatgaggtgaatgcaacgttcataagggtcgtcggaagcgagctggtcagaaagtacataggcgaaggtgctaggctagtccacgagctctttgaattggccaaagaaaaagctccaactataatattcatagacgaaattgatgcaataggtgccaagagaatggatgagaccacaggaggagaaagggaagttaatagaacattaatgcaacttctagccgagatggatggcttcgatcccaggggaaacgttaaggttatagccgcaactaacagacccgatatattggatccagcacttcttaggccaggcaggtttgacagactcatcgaggttccgttgccagacttcgaaggtaggcttgaaatactcaaggttcatacgaggaggatgaagcttaagaacgttgatctaagggtcattgcagagataacagagggggcaagtggagcggacttaaaggccatagctacggaagcgggtatgtttgccataagggagaggagaacgtacgtaacccaggaagactttctaaaagcagtcgataaggttcttggtaacgagaggaagttactgcaacagataacttcccatgagataatatacggttaa

SEQ ID NO: 5353 - protein, 399 aa, Pyrococcus abyssi GE5
MNIMSGDEVQFHENYDDYITYLKRRIRQLELQVRMLEADKERLERELSRLRSEMSRLRQPPAFAGTVIEVLDDDRAIVQNYNGPRFVVRIAPWIERDKLRPGARVALDQRTMAIIELLPSSKDPTVLGFEVIERPNVTYNDIGGLKKQLQELREAIELPLKHPELFEEVGIDPPKGVLLYGPPGCGKTLMAKALAHEVNATFIRVVGSELVRKYIGEGARLVHELFELAKEKAPTIIFIDEIDAIGAKRMDETTGGEREVNRTLMQLLAEMDGFDPRGNVKVIAATNRPDILDPALLRPGRFDRLIEVPLPDFEGRLEILKVHTRRMKLKNVDLRVIAEITEGASGADLKAIATEAGMFAIRERRTYVTQEDFLKAVDKVLGNERKLLQQITSHEIIYG

SEQ ID NO: 5354 - DNA, 1200 bp, Pyrococcus horikoshii OT3
  CDS (1)..(1200): transl_table=11
atgagtgtaatgagtggtgacgaagttcaatttcaaggggattacgatgattatataacgtacctcaagagaaggataagacaacttgaacttcaggtgaggatgcttgaagctgacaaagagagactagagagggagttatctaggctaagaagtgagatgtcaagactaagacaacctccagcttttgcaggaacggtcatagaggtcctagatgaggatagggccatagtccaaaactacaatggcccaaggttcgtagttagaatagccccctggatagacaggaaaaagctgagaccaggaactagggttgcacttgatcaaaggacaatggccgtggtggagatactccccacatctaaagatcccacagtactgggatttgaggtcatagaaagaccaaatgtaacgtacaacgatattggaggcttgaaaaagcaactacaggagttaagggaagccatagagctgcccctcaaacatccagagctctttgaagaagttggtattgatcctccaaagggtgttcttttatacggccccccaggttgcggaaaaacgttaatggcaaaggccctcgcccatgaggttaacgcaacgttcattagagttgtgggaagcgagctcgttagaaagtacattggagagggtgcaaggctcgttcatgagttattcgaacttgcaaaggagaaggccccaacaataatattcatagatgagattgatgcaataggagcaaagagaatggatgaaaccacaggaggagaaagggaggttaacaggacactcatgcaactactcgctgaaatggatggattcgatccaagaggaaacgtaaaggttatagccgcaactaataggccagatatactagatccagccctactaaggccgggaagattcgatagactaattgaggttccacttccagacttcgagggaaggcttgaaatcttaaaagttcacacgagaagaatgaaactcaaaggcgttgacttaagagccatagcagaaatgacagagggagcaagcggagcagatttaaaagccatagctactgaagctggaatgtttgcaattagggagagaaggacatacgtaactcaggaggatttccttaaagcagtagataaggttctaggaaatgaaagaaagctattacaacagataacgtcccatgaagttatctacggctga

SEQ ID NO: 5355 - protein, 399 aa, Pyrococcus horikoshii OT3
MSVMSGDEVQFQGDYDDYITYLKRRIRQLELQVRMLEADKERLERELSRLRSEMSRLRQPPAFAGTVIEVLDEDRAIVQNYNGPRFVVRIAPWIDRKKLRPGTRVALDQRTMAVVEILPTSKDPTVLGFEVIERPNVTYNDIGGLKKQLQELREAIELPLKHPELFEEVGIDPPKGVLLYGPPGCGKTLMAKALAHEVNATFIRVVGSELVRKYIGEGARLVHELFELAKEKAPTIIFIDEIDAIGAKRMDETTGGEREVNRTLMQLLAEMDGFDPRGNVKVIAATNRPDILDPALLRPGRFDRLIEVPLPDFEGRLEILKVHTRRMKLKGVDLRAIAEMTEGASGADLKAIATEAGMFAIRERRTYVTQEDFLKAVDKVLGNERKLLQQITSHEVIYG

SEQ ID NO: 5356 - DNA, 1230 bp, Aeropyrum pernix K1
  CDS (1)..(1230): transl_table=11
atgacgttaagcagtgcggggggtagcaggagccacaggcataacggcgggcacagcgagagggacgttgagatcaggattctaaaggataaggtgcgcagcctgaccaaggagaagataagcctgcagaaggaactcgagtactataaaaacgagatcaccaagctcctctcgccaccctacatcgaggccgtggtactggaagtcatagacgataacagggttgtcgtgaagagcagcacaggccccaacctcatagttaacgttgcagcgggcgtcgacgccaggtccctgaagcccggggcgatagtggccctcaacaaccggggctccacaattgttgacgtgctgccgggcaggtacgaccccctggttaaggctatggaggttgaggagaggcctaaggtgttcttcaaggacgtcgggggcctcgaggagcagattagggagatatacgaggctgtggtgctgcctataaagaacccccacctctttagggagctcgggatagacccgcctaagggggttctactccacggccccccggggacggggaagaccctcctggctaaggccgtggcgggggagacagaggccacgttcataagggttgtgggcagcgagctcgtcaacaagttcatcggggagggcgccaggcttgtgagggagatattcaggcttgcgagggagaaggccccctcaatactattcatcgacgagatagacgccatcgcatccaagagggtcgacataggaaccagcggggacagggaggtgcagaggaccatgctccagcttctcgcggagctcgacggcttcgaccccctggacaacgtgaaggtcatagcagccactaacaggctagacctcatagacccagccgtcctcaggcccggcaggttcgacaggataatagaggtgcccctgccaagcctccgggggaggctggagatactgggcatccacacaaggaaggcgaagatggcgcccgacgtcgaccttgaggcgatagccaagctcacagaaggcttcagcggcgccgacctcaaggctgtggttgtagaggctggctacaacgccataagacggggatccagggtcataactatggacgacatgataaaggcggtggaaaaggttaaggcggccttggataagaggggcggcggagacccgttcataagagcccagcagaagagcggggacgacacgatagccaccgtgatatag

SEQ ID NO: 5357 - protein, 409 aa, Aeropyrum pernix K1
MTLSSAGGSRSHRHNGGHSERDVEIRILKDKVRSLTKEKISLQKELEYYKNEITKLLSPPYIEAVVLEVIDDNRVVVKSSTGPNLIVNVAAGVDARSLKPGAIVALNNRGSTIVDVLPGRYDPLVKAMEVEERPKVFFKDVGGLEEQIREIYEAVVLPIKNPHLFRELGIDPPKGVLLHGPPGTGKTLLAKAVAGETEATFIRVVGSELVNKFIGEGARLVREIFRLAREKAPSILFIDEIDAIASKRVDIGTSGDREVQRTMLQLLAELDGFDPLDNVKVIAATNRLDLIDPAVLRPGRFDRIIEVPLPSLRGRLEILGIHTRKAKMAPDVDLEAIAKLTEGFSGADLKAVVVEAGYNAIRRGSRVITMDDMIKAVEKVKAALDKRGGGDPFIRAQQKSGDDTIATVI

SEQ ID NO: 5358 - DNA, 1332 bp, Arabidopsis thaliana
  CDS (1)..(1332)
atgggtcaaggaccttccggcggattgaatcggcaaggagatcggaaaccagatggtggagagaagaaggagaagaagttcgaaccagccgcaccacctgctcgtgtagggaggaagcaacggaagcagaaaggacctgaagcggcggcgagattgccgacggtgactccttctactaaatgtaagcttcgattgctgaaattggagcgaatcaaggactatttgcttatggaggaagagttcgtagcgaatcaggagagattgaaacctcaggaagagaaagctgaggaagatagatctaaagttgatgatcttcgtggtacacctatgagtgttggcaatcttgaagagcttattgatgagaatcacgccattgtttcttcttcggttggtcctgagtactacgttggcattttgtctttcgttgataaggatcagcttgaacctggctgctctattttgatgcataacaaggtactctctgttgttgggattcttcaagatgaagtggatccaatggtgtctgtgatgaaagtggagaaggctcctttggagtcatatgctgacattggaggtttagaagctcagattcaggagattaaggaagctgttgagttacctttaacacatcccgagctgtatgaagatattggaattaagccaccaaaaggtgtgatcttgtatggtgagccaggcactgggaagacattgcttgctaaggcagtggcaaattctacttcagctactttcttgcgtgttgtcggtagtgaactgattcagaagtatttaggagatggtcccaagcttgtgagggaacttttcagggttgctgatgacctttctccttctattgttttcatagacgagattgatgctgttggcaccaagcggtatgacgcaaactcaggtggggaacgtgaaatccaaagaaccatgttggaactactgaaccagcttgatgggtttgattcaagaggagatgttaaggttattctcgcgacaaacaggatcgagagtcttgacccggcacttcttagaccaggccggatcgacaggaaaatcgaattccctcttccagatatcaaaacaagaagacgtatcttccagatacacacatcaaagatgactttggctgaagatgtgaacttagaagagtttgtaatgacaaaagacgagttctcaggagctgatataaaggcaatatgcacagaagctggtctgcttgctcttagagagcgtcggatgaaagtgacgcatgtggacttcaagaaggcgaaggagaaggttatgttcaagaagaaagaaggagttcctgaaggtctttacatgtga

SEQ ID NO: 5359 - protein, 443 aa, Arabidopsis thaliana
MGQGPSGGLNRQGDRKPDGGEKKEKKFEPAAPPARVGRKQRKQKGPEAAARLPTVTPSTKCKLRLLKLERIKDYLLMEEEFVANQERLKPQEEKAEEDRSKVDDLRGTPMSVGNLEELIDENHAIVSSSVGPEYYVGILSFVDKDQLEPGCSILMHNKVLSVVGILQDEVDPMVSVMKVEKAPLESYADIGGLEAQIQEIKEAVELPLTHPELYEDIGIKPPKGVILYGEPGTGKTLLAKAVANSTSATFLRVVGSELIQKYLGDGPKLVRELFRVADDLSPSIVFIDEIDAVGTKRYDANSGGEREIQRTMLELLNQLDGFDSRGDVKVILATNRIESLDPALLRPGRIDRKIEFPLPDIKTRRRIFQIHTSKMTLAEDVNLEEFVMTKDEFSGADIKAICTEAGLLALRERRMKVTHVDFKKAKEKVMFKKKEGVPEGLYM

SEQ ID NO: 5360 - DNA, 1332 bp, Arabidopsis thaliana
  CDS (1)..(1332)
atgggacaaggaccatcgggaggattgaatcggcaaggagatcggaaacctgatggtggagataagaaagagaagaagtttgagccggcggcaccaccggctcgtgtagggaggaagcaaaggaagcagaaagggccagaggcggcggcgagacttccgacggtgactccgtctactaagtgtaagctccggttactgaaattggaacggatcaaggattatttgttgatggaggaagagtttgtggcgaatcaagagaggttgaaacctcaggaagagaaagctgaggaagatagatctaaggttgatgatcttcgtggtacacctatgagtgttgggaatttggaagagttgattgatgagaatcacgctattgtttcttcttctgttggacctgagtactacgttgggattttgtccttcgttgataaagatcagcttgaacctggatgttcgattttgatgcataataaggttctctctgttgttgggattctacaagatgaagtggatccaatggtgtctgtgatgaaagttgagaaagctcctttggagtcatatgctgatattggaggtttagaagctcagattcaggagattaaggaagctgttgagcttcctttgactcatcctgagttgtatgaagatattggtattaaaccaccaaagggtgtaattttgtatggtgagcctggaactgggaagacattgcttgctaaggcggttgcgaattcaacatcagctactttcttgagagttgttggtagtgagctgattcagaagtatttgggagatggtcctaagcttgtgagagaacttttcagagttgctgatgacctttcaccatcaatcgtcttcatagatgagattgatgctgttggtaccaagcggtatgacgctcactcaggaggtgaacgtgagatccaaagaactatgttggaacttctgaaccagcttgatggatttgattcaagaggagatgttaaggtcatccttgcaacaaacagaatcgagagtcttgacccagcactgcttcgacctggacggattgataggaaaatcgagttccctctcccagatatcaaaacaagaagacgtatcttccagatacacacatcgaagatgactctctcggaagatgtaaacctcgaagagtttgtgatgacgaaagacgagttctcaggagctgatataaaggctatatgcactgaggctggtctactagctctcagggagcgtcgtatgaaggtgacacatcctgatttcaagaaagcaaaggagaaggttatgttcaagaagaaagaaggcgtccctgaaggcctctacatgtaa

SEQ ID NO: 5361 - protein, 443 aa, Arabidopsis thaliana
MGQGPSGGLNRQGDRKPDGGDKKEKKFEPAAPPARVGRKQRKQKGPEAAARLPTVTPSTKCKLRLLKLERIKDYLLMEEEFVANQERLKPQEEKAEEDRSKVDDLRGTPMSVGNLEELIDENHAIVSSSVGPEYYVGILSFVDKDQLEPGCSILMHNKVLSVVGILQDEVDPMVSVMKVEKAPLESYADIGGLEAQIQEIKEAVELPLTHPELYEDIGIKPPKGVILYGEPGTGKTLLAKAVANSTSATFLRVVGSELIQKYLGDGPKLVRELFRVADDLSPSIVFIDEIDAVGTKRYDAHSGGEREIQRTMLELLNQLDGFDSRGDVKVILATNRIESLDPALLRPGRIDRKIEFPLPDIKTRRRIFQIHTSKMTLSEDVNLEEFVMTKDEFSGADIKAICTEAGLLALRERRMKVTHPDFKKAKEKVMFKKKEGVPEGLYM

SEQ ID NO: 5362 - DNA, 1293 bp, Methanocaldococcus jannaschii DSM 2661
  CDS (1)..(1293): transl_table=11
atggtttttgaagaatttatttcaactgaattgaagaaagaaaagaaagcatttactgaagaatttaaagaagaaaaggaaataaacgataattctaacttaaaaaatgatttacttaaagaggaactccaagaaaaggcaagaattgcagaattagaaagtagaatcctaaaattagaattagagaaaaaagagcttgaaagagagaatttacagttaatgaaagaaaatgagattttaagaagagaattagatagaatgagagtccctccattgatagttggaactgtagttgataaagtaggagagagaaaagtagttgtcaaaagctcaacaggcccaagtttcttagttaatgtctctcactttgtaaatccagatgatttagcccctggaaagagagtctgtttaaatcagcaaacattaacagttgttgatgtattgccagaaaataaagactacagagctaaagcaatggaagttgatgaaagaccaaatgttagatatgaagatattggtggattagagaaacaaatgcaagaaattagagaagttgttgaactcccattgaaacatccagaattgtttgaaaaggttggaattgaaccaccaaaaggtattctgctttacggaccaccaggaactggaaagacattattagctaaagctgttgctacagaaacaaatgctacctttataagagttgttggttctgaattggttaagaagtttattggagagggggcttcgttagttaaagatatattcaaattggctaaagaaaaagctccttcaatcatattcatagatgagattgatgctattgcagcaaagagaacagacgctttaactggtggagatagggaagttcagagaacattaatgcagttgttggcagagatggatggattcgatgcaaggggagatgttaagataattggggccacaaacagacctgacattttagaccctgcaatattaagacctggaagatttgatagaatcatagaagtcccagctcctgatgagaagggtagattggagatattgaagattcatacaagaaagatgaatttagcggaagatgtcaatttagaagaaatagctaagatgactgaaggatgtgtaggggctgagttaaaggcaatctgcacagaggcagggatgaatgcaattagggagttaagggactatgtaacaatggatgactttagaaaggcagttgagaagattatggagaaaaagaaagttaaagttaaggaaccagcacacttggatgttctctacagataa

SEQ ID NO: 5363 - protein, 430 aa, Methanocaldococcus jannaschii DSM 2661
MVFEEFISTELKKEKKAFTEEFKEEKEINDNSNLKNDLLKEELQEKARIAELESRILKLELEKKELERENLQLMKENEILRRELDRMRVPPLIVGTVVDKVGERKVVVKSSTGPSFLVNVSHFVNPDDLAPGKRVCLNQQTLTVVDVLPENKDYRAKAMEVDERPNVRYEDIGGLEKQMQEIREVVELPLKHPELFEKVGIEPPKGILLYGPPGTGKTLLAKAVATETNATFIRVVGSELVKKFIGEGASLVKDIFKLAKEKAPSIIFIDEIDAIAAKRTDALTGGDREVQRTLMQLLAEMDGFDARGDVKIIGATNRPDILDPAILRPGRFDRIIEVPAPDEKGRLEILKIHTRKMNLAEDVNLEEIAKMTEGCVGAELKAICTEAGMNAIRELRDYVTMDDFRKAVEKIMEKKKVKVKEPAHLDVLYR

SEQ ID NO: 5364 - DNA, 1233 bp, Methanothermobacter thermautotrophicus str. Delta H
  CDS (1)..(1233): transl_table=11
atggaaaataactcccagaatgtattaaaaaagattgaggacctcaaaaaagaagttagaatgcttaaagaggaaaactccaagacaaaaagaaatctgatgtggaaaatcagaaaacttgagaaggacaaacttttaattgaaaatgagaggacaaggcttgacagggaagttaaatcccttcgtggtgaaatcgaaaggttcagaacccctccactggtcatagccacagtaacagaggttcttgatgatcacagggtcgcagttaagagtacaaccggaccccacttcgtaataaattattcaagattcatagatagaaagcagctggagcccggtgcaagggttgcactgaaccagcagaccttcagcatagtggatgtacttccatctgagaaggaccccgttgtgacgggcatggaagtcgaggaaaaaccagatgtctcctatgagcagataggtggccttgaggaacaggtacgcgaggtcaaggagacagttgaattaccgctcaaaaaaccggaactctttgaaaagataggtatagagccacccaagggcgtactcctctatggaccacctggtacaggtaaaacactcctggcaaaggccgtcgcccatgagaccaatgcaacattcataaagatagttgcatcagagttcgtcaggaaatacataggtgagggcgcaaggctcgtgaggggagtctttgagctggccaaggagaaatccccgagcataatattcatagacgaaattgacgccgtggcagccaagaggcttaagagttcaacaagcggtgacagggaggttcagaggacactcatgcagctccttgcagagcttgatggattcgaatcaaggggtaatgtcggtatagttgcagcaaccaacagaccagacatacttgacccggcactcctccgtccaggaagatttgacaggttcattgaggtacctctaccaaatgaggatggtagaagggagatactcaagatacacacctcaggaatggcccttgcagaggaggtcgatattgaactccttgcaaggataaccgatggggcatcaggcgcagacctcaaggcaatatgtaccgaggcaggtatgtttgcaatcagggatgagcgtgatgaggtcacaatggctgacttcatggatgccgttgataagataatgggtgttgagaaggaggaggaatacaaacaggaaaccggcgtgatgttcggttaa

SEQ ID NO: 5365 - protein, 410 aa, Methanothermobacter thermautotrophicus str. Delta H
MENNSQNVLKKIEDLKKEVRMLKEENSKTKRNLMWKIRKLEKDKLLIENERTRLDREVKSLRGEIERFRTPPLVIATVTEVLDDHRVAVKSTTGPHFVINYSRFIDRKQLEPGARVALNQQTFSIVDVLPSEKDPVVTGMEVEEKPDVSYEQIGGLEEQVREVKETVELPLKKPELFEKIGIEPPKGVLLYGPPGTGKTLLAKAVAHETNATFIKIVASEFVRKYIGEGARLVRGVFELAKEKSPSIIFIDEIDAVAAKRLKSSTSGDREVQRTLMQLLAELDGFESRGNVGIVAATNRPDILDPALLRPGRFDRFIEVPLPNEDGRREILKIHTSGMALAEEVDIELLARITDGASGADLKAICTEAGMFAIRDERDEVTMADFMDAVDKIMGVEKEEEYKQETGVMFG

SEQ ID NO: 5366 - DNA, 1182 bp, Sulfolobus solfataricus P2
  CDS (1)..(1182): transl_table=11
ttgtcaggggatttcgacacaataagggatgcttcttctccggatgaagttcaattagttagattattagaagaaaaaatcaagtcattgcaaattgaaattgaaaatctaagaaaagaactaaattattataaagcagaaatggaaaaaatgttaagtcctccgctaatagaggcagttgtattggacgttttaccagacggtagagttctagttagaagttcgtcagggccaaatttggtagtaaatatagctagtcatattgatcaaaaattaataaagcctggaatatctgttgccttaaatcaaagaggatctactatactggaggttttaccacagaaggaagatccaattgtaaagacaatggaaattattgaaagacctaacgtaacttattctgagatcggtggattagaagagcaaataagggagttaagggaggtcgtggaattacctttaaagaatcctgagatatttagggagataggagtagagccaccaaagggagttttactatatggtccgcccggtacagggaagactatgttggcaaaggcagtagccactgagagtaatgctgtgtttattcatgttgttgcttcagagtttgcacaaaaatttgtgggggaaggcgctaggatagttagagagctatttgagatggctaaaagaaaggcgccatcaataatcttcattgatgaaattgatgctataggtgctaagaggatagatataggaactagtggagaaagagagatacaaaggacgctaatgcagctcttggccgaacttgatgggtttgatccattggataatgttaagatcatagcagctaccaataggatagatatattagatcctgcgttattgaggcctggtagatttgataggataatagaggttcctttacctgattttaaagggagaactgagatatttaatatatatttaaagaaaatgaaaatcgaagacaatataaaccttgagctattatctcagcttacagaagggtttagtggtgcagatattaaaaacgtttgtgttgaagctgcatatatggcaattagggacggtaggaataaggtaacgatgaacgatttagttgaggctataaacaagattaatgttaaaaggaataaaatggaaagcatgaaagagaggcgagagaagtatagctaa

SEQ ID NO: 5367 - protein, 393 aa, Sulfolobus solfataricus P2
MSGDFDTIRDASSPDEVQLVRLLEEKIKSLQIEIENLRKELNYYKAEMEKMLSPPLIEAVVLDVLPDGRVLVRSSSGPNLVVNIASHIDQKLIKPGISVALNQRGSTILEVLPQKEDPIVKTMEIIERPNVTYSEIGGLEEQIRELREVVELPLKNPEIFREIGVEPPKGVLLYGPPGTGKTMLAKAVATESNAVFIHVVASEFAQKFVGEGARIVRELFEMAKRKAPSIIFIDEIDAIGAKRIDIGTSGEREIQRTLMQLLAELDGFDPLDNVKIIAATNRIDILDPALLRPGRFDRIIEVPLPDFKGRTEIFNIYLKKMKIEDNINLELLSQLTEGFSGADIKNVCVEAAYMAIRDGRNKVTMNDLVEAINKINVKRNKMESMKERREKYS

SEQ ID NO: 5368 - DNA, 1317 bp, Caenorhabditis elegans
  CDS (1)..(1317)
atgggaaacaaaatggcccttccacagaagaaacaggagaagcccactcacgcagcaatgaagatcgcaatgaaaagcggtcgacgcggcatcgagaacgccaacaagcttccgacagttgcaccaaagcgacagtgtcttgtgcgccttctcaagatgaacaggattcatgattacttgcagttggagaaagagttcatcactcgtcaaacaagccgtcatggtcgccctcttgctgtccaaaaacgtcgtgaacagcaattagttcaaagtctccgaggaactccaaccacattggctcgtgtccacgagcttttcgatgatgagaagcatgccgttgtggtcgttgaaggttcgagacgtgaatggtacgtaccaattctctcgatcgtcgacaaggacttgcttcgtctgaatgccctcgtcatggtgaaggctggtggaatgttcaaaacagttccaagtgcaatcgttggagttttggatgacaagattgacagcaatgcgatgggacataaagttgagaagacaccaaaagagacattcgatgacattggaggatgtgagagtcaaattcaagagctgaaagagtctgtggaacttcctcttactcatccagagtactatgaagaaatgggaatcactgctccgaaaggagttattctttacggtgaacctggaactggaaagacgcttttggcgaaagcagttgcaaactcaacatctgcaacattcatccgtgcaactggatccgatcttgttcagaaacaaagtggggaaggtgctcgtcttgttcgtcaaatcttccaaatggcaaaggaacaggctccatcgattgtattcattgatgaaattgatgcagttggtacgaaaagatttgatacttcttcacgtggagaacaagaagttcaacgaactcttcttgagctcttaaatcaattggacgggtttgaaagccgtggagatgtcaaaattatcatggcaacgaacagaatcgactcgctggatcccgctcttatccgtcctggacgaattgatagaaagattgagttaccaaaaccagatgagaagactagacaaaagattttcacgatccacacctctggaatgacgattcagaaagctgtcacctatgagaatgtattgggaaaggagaagagcattagtggagctgaaatcaaggcggtttgcacggaagctggtatgctggctcttcgtgctcaacgaaaatgtgtcggaacggatgactttgagaaggctgtcaaatcggttatgctgtcgaagaagggcggagcaccagaaggattcttctcttga

SEQ ID NO: 5369 - protein, 438 aa, Caenorhabditis elegans
MGNKMALPQKKQEKPTHAAMKIAMKSGRRGIENANKLPTVAPKRQCLVRLLKMNRIHDYLQLEKEFITRQTSRHGRPLAVQKRREQQLVQSLRGTPTTLARVHELFDDEKHAVVVVEGSRREWYVPILSIVDKDLLRLNALVMVKAGGMFKTVPSAIVGVLDDKIDSNAMGHKVEKTPKETFDDIGGCESQIQELKESVELPLTHPEYYEEMGITAPKGVILYGEPGTGKTLLAKAVANSTSATFIRATGSDLVQKQSGEGARLVRQIFQMAKEQAPSIVFIDEIDAVGTKRFDTSSRGEQEVQRTLLELLNQLDGFESRGDVKIIMATNRIDSLDPALIRPGRIDRKIELPKPDEKTRQKIFTIHTSGMTIQKAVTYENVLGKEKSISGAEIKAVCTEAGMLALRAQRKCVGTDDFEKAVKSVMLSKKGGAPEGFFS

SEQ ID NO: 5370 - DNA, 1245 bp, Caenorhabditis elegans
  CDS (1)..(1245)
atgtctgccgctgctttggaggaaatcggtattgctccattacaggagaatacttctctccgtccgccaccacttccagccacctgcgttgatgtatcatcagacgactatatcaagcttacaacgctggaacgtcaactggcgcatcttcaagttatggaggactatatcaagctggagacaagaaaccttgaaaaagaattgcttcatgctcaggaagaagtgaagcgtattcaatctgtgccacttgtcattggacaattcctggaagctgtggaccaaaaccatgctatcgttggaagcaccaccggatccaactattatgtccgtgttctatcgattttggatcgtgagctgcttaagccaggatgttcggtggcccttcataaatattcaaacgcacttgttgatgttcttccaccagaggctgacagctccattcaaatgcttcgtcctgatgagaaacctgacatctcttatggagatattggaggtcttgatatgcagaagcaagaagtcagagaagctgtcgaacttccattgactcatggagaactttatcaacaaatcggaattgaccccccaagaggagttctcatgtatggaccaccaggatgtggaaagactatgttggcgaaggctgttgctgcaaatactgctgcttccttcattcgcgttgttggatctgagtttgtacagaaatatcttggagaaggaccacgaatggtgcgtgacgtcttccgtctggcaaaggaaaacagcccatctattatttttatcgatgaaattgacgcgattgctacgaaacgtttcgatgctcaaaccggagcagatcgtgaggttcaacgtattcttctcgaattgctcaatcaaatggacggttttgatcaaagcactaatgtgaaagttatcatggccactaatcgacaggatactctcgatcctgcacttcttcgtccaggtcgtctcgatcgtaagattgagttcccattgccagatcgtcgtcaaaagcgtctcgtattctcaaccgtctgctctcgtatgaacctgtcggatgatgttgatttggaagactgggttgctcgtccagacaagatttcaggagctgatatcaactctatctgtcaagaagctggtatgcaagccgttcgtgagaatcgttacgttgtgcttaccaaggatcttgagaaggcctacaagaatgttgtgaagaaggataccaacgatttcgagttctacaagtaa

SEQ ID NO: 5371 - protein, 414 aa, Caenorhabditis elegans
MSAAALEEIGIAPLQENTSLRPPPLPATCVDVSSDDYIKLTTLERQLAHLQVMEDYIKLETRNLEKELLHAQEEVKRIQSVPLVIGQFLEAVDQNHAIVGSTTGSNYYVRVLSILDRELLKPGCSVALHKYSNALVDVLPPEADSSIQMLRPDEKPDISYGDIGGLDMQKQEVREAVELPLTHGELYQQIGIDPPRGVLMYGPPGCGKTMLAKAVAANTAASFIRVVGSEFVQKYLGEGPRMVRDVFRLAKENSPSIIFIDEIDAIATKRFDAQTGADREVQRILLELLNQMDGFDQSTNVKVIMATNRQDTLDPALLRPGRLDRKIEFPLPDRRQKRLVFSTVCSRMNLSDDVDLEDWVARPDKISGADINSICQEAGMQAVRENRYVVLTKDLEKAYKNVVKKDTNDFEFYK

SEQ ID NO: 5372 - DNA, 1332 bp, Caenorhabditis elegans
  CDS (1)..(1332)
atggggcaacaacagtcaggtttcggtggaagaggaaatgaccgcggtgccggagatggagagaagaaggaaaagaagaaatatgaggcaccgattccatctaggattggaaagaagaagaaggggtctaagggacctgacgccgctagcaaacttccagctgtcacaccacatgccagatgccgtctgaagttgctgaagagcgaaagaatcaaggattatttgttgatggagcaagaattcattcaaaaccaggagcgtttgaagccacaagaggagagacaagaagaagagcgcgccaaggtggacgagctccgtggaacaccaatggcagtcggatcacttgaggaaattatcgatgatcagcacgccattgtttcaactaacgtcggaagtgagcattacgtcaacatcatgtcattcgtcgacaaggaacaactcgagccgggatgttcagtccttctcaaccacaagaatcacgccgtcatcggagttctctccgatgatacagatcctatggtgtctgtcatgaagctcgaaaaagcaccacaagaaacgtatgccgatgttggtggtcttgatcagcaaattcaagaaattaaagaagcagttgagcttccactgactcatcctgaatactacgaagagatgggaatccggcctccaaagggagttattctatacggttgtcctggtactggaaaaacgctacttgccaaggctgttgctaatcagacgtcagctactttccttcgtattgttggttcggaacttattcagaaatacctcggagatggtccaaagatggtccgtgagctcttccgcgttgctgaggagaatgcaccatcaattgtgttcattgatgaaattgatgctgttggaacaaaacgttacgattcgaactctggtggagaacgtgaaattcagcggactatgcttgaacttctcaatcaacttgatggattcgattcccgtggagatgttaaagttttgatggccactaaccgcatcgaatctctcgaccctgctctcattcgtccaggtcgtattgatcgtaagattgaattccccctgccagatgaaaaaacgaagcgccgtatcttccagatccatacatctcgaatgacactcggcaaagaagttaacctcgaagagttcatcacagcaaaggacgagttgagtggagctgatatcaaggctatgtgcacagaagctggtctcttagctcttcgcgagcgtcgtatgcgtgtcacgatggaagatttccagaagtccaaagaaaatgtgctctaccgtaagaaggaaggagctccagaagaactctatttgtaa

SEQ ID NO: 5373 - protein, 443 aa, Caenorhabditis elegans
MGQQQSGFGGRGNDRGAGDGEKKEKKKYEAPIPSRIGKKKKGSKGPDAASKLPAVTPHARCRLKLLKSERIKDYLLMEQEFIQNQERLKPQEERQEEERAKVDELRGTPMAVGSLEEIIDDQHAIVSTNVGSEHYVNIMSFVDKEQLEPGCSVLLNHKNHAVIGVLSDDTDPMVSVMKLEKAPQETYADVGGLDQQIQEIKEAVELPLTHPEYYEEMGIRPPKGVILYGCPGTGKTLLAKAVANQTSATFLRIVGSELIQKYLGDGPKMVRELFRVAEENAPSIVFIDEIDAVGTKRYDSNSGGEREIQRTMLELLNQLDGFDSRGDVKVLMATNRIESLDPALIRPGRIDRKIEFPLPDEKTKRRIFQIHTSRMTLGKEVNLEEFITAKDELSGADIKAMCTEAGLLALRERRMRVTMEDFQKSKENVLYRKKEGAPEELYL

SEQ ID NO: 5374 - DNA, 1320 bp, Drosophila melanogaster
  CDS (1)..(1320)
atgggacaaaaccaatcggctcaagggggagctggcgaaaagaaagatgacaaggataaaaagaagaagtacgagcctccaatcccaacgcgcgttggcaagaagaagaggcgcgcaaagggtccagatgcggccatgaagctgccccaggtcacgccccacacccgctgccgccttaagctgctcaagctggagcgcatcaaggattacctgatgatggaggacgagttcatccgcaaccaggagcgcctgaagccccaggacgagaagaacgaggaggagcgctccaaggttgacgatctgcgcggcacccccatgtccgtgggcaacctggaggagatcatcgacgacaaccacgccatcgtgtccacatcggtgggctccgaacattatgttagcatcctatccttcgtggacaaggatcagctggaaccaggctgctccgtgctgctcaaccacaaagtacacgctgttgtcggagttctcagcgacgacaccgatccaatggtcacggtgatgaaactggaaaaggctccgcaggagacttacgcagatatcggtggcttagacactcagatccaggagatcaaggagtctgtcgagctgccactgacccatcccgagtactacgaggaaatgggaatcaagccacccaagggcgtcatcctatatgggcctcctggcacgggcaagaccctgctagccaaggcagtggccaaccagacctcggccactttcctgcgcgttgtaggctcagagctgatccagaagtacctgggcgacggacccaagctagttcgtgagctcttccgtgtggctgaggagcacgctccatccattgtgttcatcgacgaaatcgatgcagtgggcacaaagcgctacgattcaaattctggtggcgagcgggagattcagcgtactatgttggagttactgaatcagttggatggtttcgattcgcgcggcgatgtcaaggtgatcatggccaccaatcgtatcgagacccttgacccggcgctcattcgacccggtcgtattgaccgcaagatcgagttcccgctgcccgatgagaagaccaagcgccgcatctttaccatccacacatctcgcatgacgctggccgaggacgtgaaccttagcgaactgatcatggcaaaggacgatctatccggcgccgacatcaaggccatctgtacagaggctggcttgatggcgctgcgggaacgccgcatgaaggtgaccaacgaggacttcaagaagtcaaaggagagcgtcttgtaccggaagaaggagggcacgcccgagggtctttatttataa

SEQ ID NO: 5375 - protein, 439 aa, Drosophila melanogaster
MGQNQSAQGGAGEKKDDKDKKKKYEPPIPTRVGKKKRRAKGPDAAMKLPQVTPHTRCRLKLLKLERIKDYLMMEDEFIRNQERLKPQDEKNEEERSKVDDLRGTPMSVGNLEEIIDDNHAIVSTSVGSEHYVSILSFVDKDQLEPGCSVLLNHKVHAVVGVLSDDTDPMVTVMKLEKAPQETYADIGGLDTQIQEIKESVELPLTHPEYYEEMGIKPPKGVILYGPPGTGKTLLAKAVANQTSATFLRVVGSELIQKYLGDGPKLVRELFRVAEEHAPSIVFIDEIDAVGTKRYDSNSGGEREIQRTMLELLNQLDGFDSRGDVKVIMATNRIETLDPALIRPGRIDRKIEFPLPDEKTKRRIFTIHTSRMTLAEDVNLSELIMAKDDLSGADIKAICTEAGLMALRERRMKVTNEDFKKSKESVLYRKKEGTPEGLYL

SEQ ID NO: 5376 - DNA, 1242 bp, Drosophila melanogaster
  CDS (1)..(1242)
atgccgtacaacatggacgtactgataccggaaaaggacgagctctccgacttgaagctaaaagatgcgcacagttccctggacgaactggacatggaggatctctacgtgcgttacaagaaactgcaaaagacactggagttcattgaagtgcaggaggagtacatcaaggacgagcagcgaaacctgaaaaaggagtatctgcacgcccaggaggaggtgaagcgcatccagtcggtgccgctggtgattggccagttcctggaggccgtcgatcagaacacgggcattgtgggctccaccaccggctccaattactatgtgcgcatcctgtccaccatcgatcgcgagctgctgaagccctccgcctcggtggccctgcacaagcacagcaacgcgctggtggacgtgctgccaccagaggcggatagctccatttcgatgctgcagccggatgagaagcccgacgttagctatgcggacattggtggcatggacatgcagaagcaggagatccgcgaggcagtcgaactgccgctgacccacttcgagctgtacaagcagattggcatcgatccgccgcgcggcgtgcttatgtacggtccgcccggttgcggcaagaccatgttggccaaggcggtggcccatcatacgacggcgtcgttcatacgcgtcgtcggctcggagttcgtgcagaagtacctcggcgagggaccgcgcatggtgcgcgacgttttcaggctggccaaggagaacgcgccggccatcatcttcattgacgagatcgatgcgattgccacgaagcgtttcgatgcgcagactggcgccgatcgcgaggtgcagcgcattctgctcgagctgctcaaccagatggacgggttcgatcagaccacgaacgttaaggtgatcatggctaccaacagggcggacacactcgatccggcattgctgcgacctggtcgattggatcgtaagattgagttcccgctgcccgatcgccggcagaagcgactcgtcttctccaccatcacctcgaagatgaacctaagcgaggatgtcgatttggaggagtttgtggcgcggccggacaagatctccggtgccgatatcaacgccatttgccaagaggcgggcatgcacgcggtgcgtgagaatcgctacatcgttttggccaaggacttcgagaagggctacaagaacaatatcaagaaggacgagcaggagcacgagttctacaaatag

SEQ ID NO: 5377 - protein, 413 aa, Drosophila melanogaster
MPYNMDVLIPEKDELSDLKLKDAHSSLDELDMEDLYVRYKKLQKTLEFIEVQEEYIKDEQRNLKKEYLHAQEEVKRIQSVPLVIGQFLEAVDQNTGIVGSTTGSNYYVRILSTIDRELLKPSASVALHKHSNALVDVLPPEADSSISMLQPDEKPDVSYADIGGMDMQKQEIREAVELPLTHFELYKQIGIDPPRGVLMYGPPGCGKTMLAKAVAHHTTASFIRVVGSEFVQKYLGEGPRMVRDVFRLAKENAPAIIFIDEIDAIATKRFDAQTGADREVQRILLELLNQMDGFDQTTNVKVIMATNRADTLDPALLRPGRLDRKIEFPLPDRRQKRLVFSTITSKMNLSEDVDLEEFVARPDKISGADINAICQEAGMHAVRENRYIVLAKDFEKGYKNNIKKDEQEHEFYK

SEQ ID NO: 5378 - DNA, 1191 bp, Pyrococcus furiosus DSM 3638
  CDS (1)..(1191): transl_table=11
atgagtgaggacgaagctcaatttcacggtaattatgatgattacgtcacttatctaaagagaagaataagacagctagaacttcaagtgagaatgcttgaggcagacaaagaaaggctagagagggagctctcaaggttaaggagtgaaatgtcaagactaagacaaccaccagctttcgcaggaagtgtcatagaagttttagacgatgatagagcaatagtacaaaattataacggacccaggtttgtcgttagaattgcaccatggatagataagagcaaactaaggccaggaacaagggtagcccttgaccaaagaacaatggcaataatagaaatactaccagcttcaaaagacccagcagtcctgggatttgaagttgtagagaggcccaatgtaacgtataacgacattggaggactcaagaaacaactccaggaacttagggaagcaatagaattaccattaaagcatccagaactgtttgaagaagttggaattgatcctccaaagggagttctgctctatggaccacctggatgtggaaaaactttaatggctaaggcaatagctcatgaagttaatgctacattcattagggttgtgggaagcgagctcgttaggaagtacattggagaaggtgccaggctagtccatgagctatttgaattggcaaaagaaaaagctccaacaataatattcattgacgaaattgacgcaatcggcgccaaaaggttagatgagaccacaggtggagaaagagaagtaaatagaacactaatgcaactcttagctgaaatggacgggtttgatccaagaggaaatgtaaaagtaatagcagctactaacaggccagacatcctcgatcctgctcttctcagaccaggtagatttgacaggcttattgaggttccattaccagactttgaaggaagactggaaatcctaaaagtccacacaagaaggatgaagctaagaggagtagatctaagacttatagcagagctaacagagggggcaagtggagcggatctaaaggccatagctacagaggctggtatgtttgcaataagagaaagaagaacttatgtaactcaggaagacttcttaaaagccatagacaaagtgttaggcaatgaaaagaagatcattcagcagataatgtcacatgaagtcatttacggctga

SEQ ID NO: 5379 - protein, 396 aa, Pyrococcus furiosus DSM 3638
MSEDEAQFHGNYDDYVTYLKRRIRQLELQVRMLEADKERLERELSRLRSEMSRLRQPPAFAGSVIEVLDDDRAIVQNYNGPRFVVRIAPWIDKSKLRPGTRVALDQRTMAIIEILPASKDPAVLGFEVVERPNVTYNDIGGLKKQLQELREAIELPLKHPELFEEVGIDPPKGVLLYGPPGCGKTLMAKAIAHEVNATFIRVVGSELVRKYIGEGARLVHELFELAKEKAPTIIFIDEIDAIGAKRLDETTGGEREVNRTLMQLLAEMDGFDPRGNVKVIAATNRPDILDPALLRPGRFDRLIEVPLPDFEGRLEILKVHTRRMKLRGVDLRLIAELTEGASGADLKAIATEAGMFAIRERRTYVTQEDFLKAIDKVLGNEKKIIQQIMSHEVIYG

SEQ ID NO: 5380 - DNA, 1275 bp, Encephalitozoon cuniculi GB-M1
  CDS (1)..(1275)
atgagcagagacaaatccgagcgggataaccttcaggacacaaccacaataaacctgaggaggcgcaggagagtaaaggagggcaaggcagcctccaagccgccgcaggtgtatccattgatgaagtgtaagctgagatatctgaagttgaagaagctggcgcacttattatctttagaagacaacatactgagcttatgcgagccagacaagtcgtccgagggatcgaatagccagaagcatgttgttgagcagcttcgcgggagccctctttctgtcgggacgcttgaggagtttgtcgacgaccaccacggaataattaccacgggtgttgggttggaatactatgtcaacatcatgtcgtttgttgacaaggacctacttgagcctggatgcactgttctcctgaactacaaagacaatagtgttgtgggcgttctggagggggagatggatccaatggtcaatgtcatgaagttggaaaaggcaccttcggagacatatgcggacatcggggggcttgaggaacagatccaagagataaaggaaagtgttgagcttccactgacgaaccccgagctttaccaggaaatggggataaagcccccaaagggagtgattctgtacggacttcctggaacagggaagactctcctagccaaggccgttgcaaaccagacatctgcaacttttcttagggttgttgggacggagcttatacaggagtatctcggggaaggcccgaagcttgtaagggagctcttcagggttgcagacatgcatgcaccatcaataatttttattgacgagatagatgcaattggagggaaaaggtacaatacatcctctggtgggcggagggaggtccaaaggacgatgctagagttgctgaaccaactggatggatttgacaccaggaacgatatcaaggtgataatggccacgaataagatagaagcccttgacccggctttgatcaggcctggcagaatcgataggaaaatcgagtttggcatgccggatgccgctacaaagaagaaaatattcgatattcatacatcgaggatgacactggatgaaagtgtgaacatcgagctactaataacgagcaaggaggatttgagcggagctgatataaaggcaatctgcacagaggctggtatgatagcattgagagaaaggagaaaaacagttaccatgaaggactttatttctgcaagagaaaaggtattcttttcaaagcaaaagatggtttctgctgggctttattcctga

SEQ ID NO: 5381 - protein, 424 aa, Encephalitozoon cuniculi GB-M1
MSRDKSERDNLQDTTTINLRRRRRVKEGKAASKPPQVYPLMKCKLRYLKLKKLAHLLSLEDNILSLCEPDKSSEGSNSQKHVVEQLRGSPLSVGTLEEFVDDHHGIITTGVGLEYYVNIMSFVDKDLLEPGCTVLLNYKDNSVVGVLEGEMDPMVNVMKLEKAPSETYADIGGLEEQIQEIKESVELPLTNPELYQEMGIKPPKGVILYGLPGTGKTLLAKAVANQTSATFLRVVGTELIQEYLGEGPKLVRELFRVADMHAPSIIFIDEIDAIGGKRYNTSSGGRREVQRTMLELLNQLDGFDTRNDIKVIMATNKIEALDPALIRPGRIDRKIEFGMPDAATKKKIFDIHTSRMTLDESVNIELLITSKEDLSGADIKAICTEAGMIALRERRKTVTMKDFISAREKVFFSKQKMVSAGLYS

SEQ ID NO: 5382 - DNA, 1170 bp, Schizosaccharomyces pombe
  CDS (1)..(1170)
atgaatagtacagaggaaattgatttgtacaatcgctggaaagcgctagagcgccaattagaaatgctggatttacaagaaggattcatcaaagaagactgtaaatcactcaagcgagaattaataagagcacaagaagaagtgaaacgaatacaatctgtgcctctagtaatcggacaattcttggaggccattgatcaaaatactgctattgtaggaagtacaactggatctaattatgtcgttcgtattttaagtacacttgatcgagagcttttaaaaccttcagcaagtgtcgctcttcaacgacactcaaacgctttagtcgacattttaccaccagaagcagattcatctatttctatgcttcgtccagatgaaagacctgatgtttcttatgctgatgttggtggtttagatgttcaaaagcaagaagttcgtgaagccgttgaattacctctaacacaaggcgatctttatcgtcagattggtattgatcctcctagaggcgttttactttacggtcctccaggtaccggtaaaacaatgcttgtaaaagctgtggccaactcaacagctgccaactttattcgtgttgttggatctgaatttgttcaaaaataccttggtgagggtccacgtatggttcgagatgtatttagaatggcacgtgaaaatgctcctgctattatttttattgatgaaattgatgctattgctacaaagcgttttgatgcccaaaccggtgctgatcgtgaagtccaacgtattttgattgaacttttaacccagatggatggttttgatcaaggtgctaatgttaaagtaatcatggctactaatcgtgccgacactctagatcctgctcttcttcgtcctggccgtttagatcgaaaaattgaatttccttcctaccgcgatcgtcgccaacgtcgacttgttttccaaaccatcacagctaaaatgttgctttctcccgaggttgacttggatacatttattatgcgaccagatgcatctagtggtgctcaaattgctgccatcatgcaagatgcaggtcttttagctgtgcgaaagagtcgtggcgtcatccttcaaagcgacattgaagaggcttatgctcgtgccgttaagcctacagatatggaacagtttgctttctataaataa

SEQ ID NO: 5383 - protein, 389 aa, Schizosaccharomyces pombe
MNSTEEIDLYNRWKALERQLEMLDLQEGFIKEDCKSLKRELIRAQEEVKRIQSVPLVIGQFLEAIDQNTAIVGSTTGSNYVVRILSTLDRELLKPSASVALQRHSNALVDILPPEADSSISMLRPDERPDVSYADVGGLDVQKQEVREAVELPLTQGDLYRQIGIDPPRGVLLYGPPGTGKTMLVKAVANSTAANFIRVVGSEFVQKYLGEGPRMVRDVFRMARENAPAIIFIDEIDAIATKRFDAQTGADREVQRILIELLTQMDGFDQGANVKVIMATNRADTLDPALLRPGRLDRKIEFPSYRDRRQRRLVFQTITAKMLLSPEVDLDTFIMRPDASSGAQIAAIMQDAGLLAVRKSRGVILQSDIEEAYARAVKPTDMEQFAFYK

SEQ ID NO: 5384 - DNA, 1347 bp, Schizosaccharomyces pombe
  CDS (1)..(1347)
atgggacaagcacaatctgggaatttttctaatttcggcgatggtgccaacggcgacaataaaaaagaccaaaagaaagataagcccaaatacgaacctccagttcccactcgaactggtcgtcgtaagaagaaggctcaaagtggtcctgatgcatcggcaaaactacctactgttatcccaacgactcgttgtcgtttaaggttgttaaaaatgcaaagaatccacgatcatttgcttatggaagaagagtatgtgcaaaaccaggaacgtcttaagccacaggatgaacgaactcaggaagaacgcaatcgtgtagatgaaattcgtggtactccaatgtctgtaggaactttagaggaaattatagacgacgatcatgccatcgtttccacagctggaccagagtactatgtttccatcatgtcatttgtcgataaagacatgttagagcctggttgcagtgtacttctccatcacaaagccatgagtatagtaggcttacttcttgatgataccgatccaatgattaatgttatgaaactcgacaaagcacctacagaaagttatgccgatattggtggtcttgaatctcaaattcaagagatcaaagaggctgtagagcttcctcttacccatcctgaactctatgaggaaatgggcataaaaccccctaaaggtgtcattttatatggtgctcccggtactggtaaaactttactagcgaaagctgttgctaatcaaacttctgctacgttcttgcgtgtcgttggttctgaacttattcaaaaatatttaggtgatggtccccgtcttgtgagacaattatttaatgctgccgaagaacattcgccctctattgtttttattgatgaaattgatgctataggtacaaagcgttacgatgcccagtcgggtgctgaacgagaaattcaacgtactatgcttgagttactcaatcagttggatggattcgatacgagtcagcgtgatattaaggttattatggctactaaccgtatcagcgatcttgatccggctcttattcgtccaggtcgtattgaccgcaaaattcttttcgagaatcctgatgaagctacgaaacgtaaaatttttaccattcacacttccaagatgaatttgggcgaggatgttaatttagaagagttaattcaatgcaaagatgatttatctggtgcagaaattaaagcaatcgtttctgaagctggtttgcttgctctgcgtgaacgccgaatgcgagttgttatggacgactttcggcaagctcgtgaaaaggttttaaaaacgaaggacgaaggtggacctgctggtggtctttatatctaa

SEQ ID NO: 5385 - protein, 448 aa, Schizosaccharomyces pombe
MGQAQSGNFSNFGDGANGDNKKDQKKDKPKYEPPVPTRTGRRKKKAQSGPDASAKLPTVIPTTRCRLRLLKMQRIHDHLLMEEEYVQNQERLKPQDERTQEERNRVDEIRGTPMSVGTLEEIIDDDHAIVSTAGPEYYVSIMSFVDKDMLEPGCSVLLHHKAMSIVGLLLDDTDPMINVMKLDKAPTESYADIGGLESQIQEIKEAVELPLTHPELYEEMGIKPPKGVILYGAPGTGKTLLAKAVANQTSATFLRVVGSELIQKYLGDGPRLVRQLFNAAEEHSPSIVFIDEIDAIGTKRYDAQSGAEREIQRTMLELLNQLDGFDTSQRDIKVIMATNRISDLDPALIRPGRIDRKILFENPDEATKRKIFTIHTSKMNLGEDVNLEELIQCKDDLSGAEIKAIVSEAGLLALRERRMRVVMDDFRQAREKVLKTKDEGGPAGGLYI

SEQ ID NO: 5386 - DNA, 1317 bp, Schizosaccharomyces pombe
  CDS (1)..(1317)
atgccacctaaagaagattgggagaaataccaaaagccagttgatacggaagaagaaaatgataaaaatccaccacctttagacgaaggagacatcgagctcttaaaaagctacgctacaggcccatatgctagagaattagcagctattaaagaagatacagaggctgtgttaaaaagaattaatgatactgttggaattaaggagtctgacactggtctagcaccaatttcattttgggacgttgctgcggaccgccaaaggatgagtgaagaacaacctttacaggttgccagatgtaccaaaattattgagaatgaacaatctgcggagaaaaatgcatatgtcattaatttgaaacagattgcaaaatttgttgtcagtttaggtgaacgagttagtcccaccgatattgaagaagggatgcgtgtcggttgtgatcgtaacaaatatgctattcagcttcctcttcctcccaaaattgatccttcagttactatgatgcaagttgaagaaaagccagatgttacttacggagatgtgggtggttgtaaagaacaaatagaaagacttcgcgaagtcgtcgagcttcctttactatctcccgaaagatttgttaagcttggtattgaccctcccaagggtattatgctttatggaccaccagggactggtaagacactatgtgctcgtgctgttgccaatcggactgatgcaacttttattcgtgtaatcggttccgagttggttcaaaaatatgtcggtgaaggtgctcgtatggttagagaattatttgaaatggcacgaactaaaaaagcatgtattatcttttttgacgaaattgacgctattggcggggctcgctttgatgatggagcaggtggtgataatgaagttcaaagaacaatgcttgaattaattacccagttggatggattcgaccctcgtggtaacattaaagttctgtttgcgaccaacagaccaaataccttggatgaagctttgatgcgtcccggtcgtatagatcgtaaagttgagtttggtttacctgatttagaaggtcgtgctcatattttacgcatccacgctaaaagtatggcgattgacaaggatattcgttgggaattaattgcacggttatgcccttcacaaactggtgcagagcttcgttctgtatgcactgaggctggaatgtttgcgattcgtgctagaagaagagttgctaccgaaaaggatttccttgacgccgttcaaaaggttgtaaaaggtaaccaaaagtttagcagtactgctgattatatgaacatgagctcttag

SEQ ID NO: 5387 - protein, 438 aa, Schizosaccharomyces pombe
MPPKEDWEKYQKPVDTEEENDKNPPPLDEGDIELLKSYATGPYARELAAIKEDTEAVLKRINDTVGIKESDTGLAPISFWDVAADRQRMSEEQPLQVARCTKIIENEQSAEKNAYVINLKQIAKFVVSLGERVSPTDIEEGMRVGCDRNKYAIQLPLPPKIDPSVTMMQVEEKPDVTYGDVGGCKEQIERLREVVELPLLSPERFVKLGIDPPKGIMLYGPPGTGKTLCARAVANRTDATFIRVIGSELVQKYVGEGARMVRELFEMARTKKACIIFFDEIDAIGGARFDDGAGGDNEVQRTMLELITQLDGFDPRGNIKVLFATNRPNTLDEALMRPGRIDRKVEFGLPDLEGRAHILRIHAKSMAIDKDIRWELIARLCPSQTGAELRSVCTEAGMFAIRARRRVATEKDFLDAVQKVVKGNQKFSSTADYMNMSS

SEQ ID NO: 5388 - DNA, 1164 bp, Encephalitozoon cuniculi GB-M1
  CDS (1)..(1164)
atgtctgcaaggctcaagggcggtctgtttgtcagatacaaacaaatggaaaggaagctcaggctcctggagataagagaggggtatgtgcgcaaggagatcgagactctcaagagggaggagaggcacagcagggaggagcttgaccgggtcaagagtgttccgctgataatggggcagtttcttgagccgattgacagctcgacggcgattgtggggtcgactgcgggaagcaactttgttgtcaggattctgtcgactgtggacagggagctgctgaagccaaacaccactgttgcgctgcacaggcactcgagcgcgattgtcggggtgctcccgccggaggtcgacagcacgattccagtgatgggggagtccgagaagccctctgtgacgtacggagatgtggggggccttgatgtgcagaagcaagagataaaggagactgtggagctcccgctgttgcagtctgacctgtacaggcagattggaattgaccctccgcagggcgttctgctctatgggccgcccggaacggggaagacgatgcttgtgaaggctgtggcgaaccacacgaaggccacgtttatcagggtgaacgggtcagagttcgtgcagaagtatcttggagagggcccgcggatggtcagggatgtgttccggctggcaagggaaaaggcgccgtcgattgtgtttatcgacgaggtggactcgattgcaacgaagaggtttgatgcatcgacctcggcagacagagaggtccagcgtgtgctgatagagctgctgaaccagatggacgggttcgacccggcggcaaatgtcaaggtgattatggccacgaacagggcggacacgattgaccctgcactcctcaggcctgggaggctggacagaaagatagagtttccgctccccgacaggaggcagaagagacttgtgttcaatgcgattacatcgaagatgagcctgaatgactctgtggacattgaaagccttgtgtgcaggcccgagaagataagctgtgcagacatcaactcgatctgccaggaggcggggatgcttgctgttcgggccagcagatacatggttacgcagagggactttgaggaggcatactcgaaggttgttgagaggagcggcacacagcctgcattctataattaa

SEQ ID NO: 5389 - protein, 387 aa, Encephalitozoon cuniculi GB-M1
MSARLKGGLFVRYKQMERKLRLLEIREGYVRKEIETLKREERHSREELDRVKSVPLIMGQFLEPIDSSTAIVGSTAGSNFVVRILSTVDRELLKPNTTVALHRHSSAIVGVLPPEVDSTIPVMGESEKPSVTYGDVGGLDVQKQEIKETVELPLLQSDLYRQIGIDPPQGVLLYGPPGTGKTMLVKAVANHTKATFIRVNGSEFVQKYLGEGPRMVRDVFRLAREKAPSIVFIDEVDSIATKRFDASTSADREVQRVLIELLNQMDGFDPAANVKVIMATNRADTIDPALLRPGRLDRKIEFPLPDRRQKRLVFNAITSKMSLNDSVDIESLVCRPEKISCADINSICQEAGMLAVRASRYMVTQRDFEEAYSKVVERSGTQPAFYN

SEQ ID NO: 5390 - DNA, 1311 bp, Methanopyrus kandleri AV19
  CDS (1)..(1311): transl_table=11
atggaagaaacaggcgtgaaagacgtgagggatctctgcgagaagtttctggacttcaagcgtgaaaaggagcggttggaagagctcctcaaggagtacttcaagcggttggaggagttggagcggaagctgcgagcccacgaggagaagcttcgcatcgaggcccgtcgtcgtaagactctggagaaggagttggagatggagcgcgacgagaaggccgagctgcgggaggagctacggcgtaaagaagtcatgatcgagaagctccgtagcgacctgcagcggatgaagaagcccccgctcatcgtgggtaccgtcgaagagatcctcgacgacggtcgcgtgatagtgaagagttccacgggtccgaagttcgtctcgaacgtgagcccgaccgtagacagaaacgagctcgagccgggtgctaacgtggccctcaaccagcagagcatggccgtggtggacgtgttaccgtcggagaaagactcacgtgtactggcgatggaggtggacgagtcacccgatgtgtcgtacgacgatatcggcggtctggacgagcagatccgcgagatccgagaagtcgtggagaagccgctcaaggagcccgagctgttcgagaaggtcggtgtcgaaccgccgaagggtgtcctactgtacggtccaccgggcaccggtaagaccctgctggccaaagccgtggcgaaccacgccgacgccaccttcatccggctcgccgcgccggaattggtccagaagttcatcggcgaaggtgctagactggtgcgggagctgttcgaactcgcacgcgagaaggctccgagtattatcttcatcgacgagatcgacgcgatcggtgcccggcgaatgcgggacgcgacgagcggagaccgcgaggtccagcgcacgctcacccagctgctcgcggagatggacggcttcgatccgctcgacgacatcaaggtcatcgcggccacgaaccggaaggacatcctggacccggccttgctgcgaccgggtcggttcgacaggcacattaagatcccgctaccggacgaggagggccggtacgagatcttcaagatccacacgcgcgacatgaacttggccgaggacgtcgatctccagaagctggcgaagatcaccgagggtgcctcaggtgcggacatcaaggccatatgtaccgaggctggtatgatggctatacgcgaggaccgtgacattgtcaccatggatgacttcctgaaggccgtggacagggtcatgggtaagaaggaagaagagagcggagagttcaagcgcgcgtaccactga

SEQ ID NO: 5391 - protein, 436 aa, Methanopyrus kandleri AV19
MEETGVKDVRDLCEKFLDFKREKERLEELLKEYFKRLEELERKLRAHEEKLRIEARRRKTLEKELEMERDEKAELREELRRKEVMIEKLRSDLQRMKKPPLIVGTVEEILDDGRVIVKSSTGPKFVSNVSPTVDRNELEPGANVALNQQSMAVVDVLPSEKDSRVLAMEVDESPDVSYDDIGGLDEQIREIREVVEKPLKEPELFEKVGVEPPKGVLLYGPPGTGKTLLAKAVANHADATFIRLAAPELVQKFIGEGARLVRELFELAREKAPSIIFIDEIDAIGARRMRDATSGDREVQRTLTQLLAEMDGFDPLDDIKVIAATNRKDILDPALLRPGRFDRHIKIPLPDEEGRYEIFKIHTRDMNLAEDVDLQKLAKITEGASGADIKAICTEAGMMAIREDRDIVTMDDFLKAVDRVMGKKEEESGEFKRAYH

SEQ ID NO: 5392 - DNA, 1326 bp, Methanosarcina acetivorans C2A
  CDS (1)..(1326): transl_table=11
atgaacttaaatattattcggagctccatgacggaaattaccaaaagtaaggatgaaagcatgcgcagtcaccttgtgaagcccggatctgtgtatgacggaatcgagcctggagagctgggggagtcaactgaaagcgtccaggaccgagtgaggcaactcgaaagccgcaacagttttctggaagagcagtgcagccagatagagtccgaaaaacgctatttggagaaccagaagatcaagtatgagagagaaatacgaaagcttcagtcggaactcgatcgcatgaagacctctccgctgatcattggtacggttattgatgtgatcaagaatgatcgtataatcgtccgtagcagcaatggccctcagtttctggttaacgtctcacaatatattgacgagaaaaaactgctgccaggggcaaaggtcgccttgaaccagcatacacttgccattgcagaggttattccttcaacagaagagccttttgttgctgcaatggaagtaattgaaagtattgaagttgattacgaccagatcggcggtctcgatgagcagattcaggaacttcaggaagcagtcgaacttccgctaatcgaacctgagcgctttgccaggataggaattgagccccccaaaggagtattactctatgggctcccgggaacaggtaaaaccctgctcgcaaaagccgtagcccacaggaccaatgcgacatttatcagagttgttggttccgaacttgtacagaaatacataggggacggttccaaactggtaagagaaatcttcgagatggcgaggaaaaaagctcccagcatcatatttatcgatgaactggattcgatagctgcaaggcgcttaaacgagacgactggcgcagatagggaagttcagagaactttgatgcagcttcttgcagaaatggatggttttgacaagaggaaaaacattcggatcattgcagccacaaacagaccggatgtccttgaccctgcaattctcaggccgggccgttttgacaggcttgtccatgtcccgatgcccggaatagaggccagaggaaaaatcctcaaaatccattgtggaaagatgactcttgcgggagatatcgactttaaaaagcttgcaaaagttaccgaagggatgagcggggcagacctgaaggcaattgccacagaagcaggcatgttcgcggtcagaaaagataaggcccttgttgaaatggaagatttcctcgaagcagtagagaaggtatctatggctgcggatacgcagaagatgatgcctggcaaccttccagagacaacaatgttcgtgtaa

SEQ ID NO: 5393 - protein, 441 aa, Methanosarcina acetivorans C2A
MNLNIIRSSMTEITKSKDESMRSHLVKPGSVYDGIEPGELGESTESVQDRVRQLESRNSFLEEQCSQIESEKRYLENQKIKYEREIRKLQSELDRMKTSPLIIGTVIDVIKNDRIIVRSSNGPQFLVNVSQYIDEKKLLPGAKVALNQHTLAIAEVIPSTEEPFVAAMEVIESIEVDYDQIGGLDEQIQELQEAVELPLIEPERFARIGIEPPKGVLLYGLPGTGKTLLAKAVAHRTNATFIRVVGSELVQKYIGDGSKLVREIFEMARKKAPSIIFIDELDSIAARRLNETTGADREVQRTLMQLLAEMDGFDKRKNIRIIAATNRPDVLDPAILRPGRFDRLVHVPMPGIEARGKILKIHCGKMTLAGDIDFKKLAKVTEGMSGADLKAIATEAGMFAVRKDKALVEMEDFLEAVEKVSMAADTQKMMPGNLPETTMFV

SEQ ID NO: 5394 - DNA, 1242 bp, Methanosarcina mazei Go1
  CDS (1)..(1242): transl_table=11
atgtcagaagacagtgccataagatcctctctggaagatattaagtccagggtagagtttcagcttgagtgcggggagatcatcccggaggatgtgaaaactctcttaacagagatagaaatactcaaggtccagaacgaaaacatgaaggcacggctccttgaagcgagcgtagctacaggcaggcaccttcaggagataaacaaattaaaagcccatctggagcagcttaccgaaccgcctcttttcattgcaaccattcttgaagtaaacggggagattgcccttatcaggcagcacggaaataaccaggaagtcctcacccagatcccggaagagtgcctcgggaaaatagagcccgggatgagggttgctgtaaacggggcttactctatcatctccatagtgagcagggctgcagatgtgcgggctcaggttatggagcttatcaactctccgggcatagactacagcatgatcggagggctggatgatgtacttcaggaagtccgtgaaagcgtggaactcccactcaccgagcccgaactcttcgaagacctgggaatcgagcctccatccggagttcttctccacggggctccgggtaccggaaagacccttattgcaaaagccatagcctctcaggcaaaagccacctttatcaggatgtcaggctctgacctcgtccagaaattcgttggagaaggttcaaggcttgtcaaggatattttccagcttgcaagggacaagtctccaagtatccttttcatagacgaaatcgatgcggtgggcagcatgaggacctatgacgggacaagcggctcggcagaggtaaacaggacaatgctccagctccttgccgagatggacggctttgatcccaaaggcaacgtaaaggtagttgctgcaaccaacaggattgaccttcttgacccggctctcctaaggccaggcaggtttgacaggtcgattgaagtccccctccctgatgacaagggcaggatcgagatcctgaagatccacacccgaaagatgaagcttgcagatgatgtggactttgagaagcttgcaaaggtcatgtcaggcagaagcggtgcagagatcagcgtaattgtcaaggaagccggaattttcgtcctgcgcaggcgtggaaaagagatcaccatggcagacttcatgaaagcctacgacaaagtcgtaaacgtacaggagcccacaatcccgcaggctatgttcgtgtaa

SEQ ID NO: 5395 - protein, 413 aa, Methanosarcina mazei Go1
MSEDSAIRSSLEDIKSRVEFQLECGEIIPEDVKTLLTEIEILKVQNENMKARLLEASVATGRHLQEINKLKAHLEQLTEPPLFIATILEVNGEIALIRQHGNNQEVLTQIPEECLGKIEPGMRVAVNGAYSIISIVSRAADVRAQVMELINSPGIDYSMIGGLDDVLQEVRESVELPLTEPELFEDLGIEPPSGVLLHGAPGTGKTLIAKAIASQAKATFIRMSGSDLVQKFVGEGSRLVKDIFQLARDKSPSILFIDEIDAVGSMRTYDGTSGSAEVNRTMLQLLAEMDGFDPKGNVKVVAATNRIDLLDPALLRPGRFDRSIEVPLPDDKGRIEILKIHTRKMKLADDVDFEKLAKVMSGRSGAEISVIVKEAGIFVLRRRGKEITMADFMKAYDKVVNVQEPTIPQAMFV

SEQ ID NO: 5396 - DNA, 1323 bp, Methanosarcina mazei Go1
  CDS (1)..(1323): transl_table=11
atgaacttaaataatattcggagctccatgacggaaagtaccaagagtaaggatgaaagcatgcgcagtcaccttgtgaagcccggatctgtgtatgacggaatcgagcctggagagctgggggaaacaactgaaagcgtccaggaccgagtgaggcaacttgaaagccgcaacagttttctggaagagcagtgcagccagatagagtccgaaaaacgctatttagagaaccaaaagatcaaatatgagagggagatacgaaagctgcagtccgagctagatcggatgaaaacctctcctctgatcattggtacggttattgacgtgatcaagaatgatcgtattatagtccgtagcagtaacgggcctcagttcctggtaaacgtctcacaatatattgacgagaaaaagctgctgccaggggcaaaagttgccttgaaccagcatacacttgccattgcagaggttatcccttccacggaagagccttttgtagctgcaatggaggttatcgaaagtgttgaagttgattacgatcagataggtggtctcgacgagcagattcaggaacttcaggaagcagtagaacttccgttaacttcgcctgaacgctttgcccggataggaattgagcccccaaaaggagtattactttacgggcttccgggaacgggcaaaaccttgcttgcaaaagccgtagcccacaggaccaatgctacatttatcagagttgttggttctgaactggtgcagaagtacataggggacgggtccaagctggtcagggaaatcttcgagatggcacggaaaaaagctcccagtatcatttttatcgatgaactggattcgatagctgcaaggcgtttaaacgagacaactggcgcagatagagaggttcagagaactttgatgcagcttcttgcagaaatggatggctttgacaagaggaaaaacatcaggattattgcagcaacaaacagaccggacgtccttgaccctgcaattctcaggccaggccgttttgataggcttgtccatgttcccatgcccggtatcgaagccaggggaaaaatccttaaaatccattgcgaaaagatgactcttgcagaagacatcgatttcaaaaagcttgcaaaagctaccgaaggaatgagcggggcagacctgaaagctatagctaccgaagcaggcatgttcgcggtcagaagagataaggaactggttgagatggaagagttcctcgaagcagtggaaaaggtgtccatggctgcggatacgcagaagatgatgccttccaaccttccggaaaccatgttcgtgtaa

SEQ ID NO: 5397 - protein, 440 aa, Methanosarcina mazei Go1
MNLNNIRSSMTESTKSKDESMRSHLVKPGSVYDGIEPGELGETTESVQDRVRQLESRNSFLEEQCSQIESEKRYLENQKIKYEREIRKLQSELDRMKTSPLIIGTVIDVIKNDRIIVRSSNGPQFLVNVSQYIDEKKLLPGAKVALNQHTLAIAEVIPSTEEPFVAAMEVIESVEVDYDQIGGLDEQIQELQEAVELPLTSPERFARIGIEPPKGVLLYGLPGTGKTLLAKAVAHRTNATFIRVVGSELVQKYIGDGSKLVREIFEMARKKAPSIIFIDELDSIAARRLNETTGADREVQRTLMQLLAEMDGFDKRKNIRIIAATNRPDVLDPAILRPGRFDRLVHVPMPGIEARGKILKIHCEKMTLAEDIDFKKLAKATEGMSGADLKAIATEAGMFAVRRDKELVEMEEFLEAVEKVSMAADTQKMMPSNLPETMFV

SEQ ID NO: 5398 - DNA, 1200 bp, Drosophila melanogaster
  CDS (1)..(1200)
atgagcaaagacgtaggaatcccagagggttccgaaggctttcattcatattatacgcagaaaatatcagagcttcagttcactgtgaacgaacgccaaaagaacttgctccgtttgcaggctcagagaaatgaactcaacctcaaggttcgcttgctgcgcgaggagctgcagttgctccaggagcaggggagctatattgcggaggttgtgaagcccatggacaagaataaggtccttgtgaaggttcatcccgagggcaagtatgtagtggatgtggacaagaccatcaatattaaggatgtgacacccagcagcagggtggccctgcgaaacgagagctacacgcttcacaaaattctgcccaataaggtggacccattagtatcccttatgttggtggaaaaggtgcccgactccacctacgaaatggtgggtggcttggacaagcagatccaggagatcaaggaggtgattgagctgcctgtaaagcatccggaattatttgacgccttgggcattacccagccaaagggagtgctcctctacggaccgcctggaactgggaaaaccctgttagcccgagctgtagcccatcacacggagtgcacttttatacgggtttcagggtcggaactggttcagaaattcatcggcgagggttcgagaatggtaagggagctttttgtgatggctagggaacacgctccatccataatattcatggacgagatcgactcgattggttccgctcgactggaaaccggaacgggggattcggaggtccagcgaaccatgctggagcttctgaaccaactggacggcttcgaggctactaaaaacattaaggtgatcatggccaccaatcgcatcgatgtcttggatcaggcattactgcgtcctggtcgaattgaccgcaagatcgagtttccgccaccaaacgaagaggccagattggatatcctgaagatacattctcgcaagatgaacctcaccagaggcatcaatcttcgcaagattgctgaagaaatgccgggggcttctggtgctgaagtcaagggtgtttgcaccgaggcgggaatgtatgctctgagggaaagacgggtccatgtcacccaggaggactttgaaatggccgtctccaaggtaatgatgaaggactccgagaagaacatgtccatcagaaagttctggaaatag

SEQ ID NO: 5399 - protein, 399 aa, Drosophila melanogaster
MSKDVGIPEGSEGFHSYYTQKISELQFTVNERQKNLLRLQAQRNELNLKVRLLREELQLLQEQGSYIAEVVKPMDKNKVLVKVHPEGKYVVDVDKTINIKDVTPSSRVALRNESYTLHKILPNKVDPLVSLMLVEKVPDSTYEMVGGLDKQIQEIKEVIELPVKHPELFDALGITQPKGVLLYGPPGTGKTLLARAVAHHTECTFIRVSGSELVQKFIGEGSRMVRELFVMAREHAPSIIFMDEIDSIGSARLETGTGDSEVQRTMLELLNQLDGFEATKNIKVIMATNRIDVLDQALLRPGRIDRKIEFPPPNEEARLDILKIHSRKMNLTRGINLRKIAEEMPGASGAEVKGVCTEAGMYALRERRVHVTQEDFEMAVSKVMMKDSEKNMSIRKFWK

SEQ ID NO: 5400 - DNA, 1170 bp, Drosophila melanogaster
  CDS (1)..(1170)
atgcgtttgttaaaggaggaaattgcccagtttcacgagcagtcgctggagaagtatgatggactggatccgcatgatctgtatgtactatataagaagcttcagatggagctggagctcatccagttcatacacgctcaggaggaagttaagcgcataaaagccgtgcctctggtcattggccagtttctggaggcggtggatgaaaacaacggcatagtggcctccaccaccggatccaattactatgttcgagtgctatccaccattgacagggagcaactgaagccgtcctcttcggttgggctgcacaagcaaagcaattgtctggtcgatctggtgccaccggaggcggacagcaccatatcgatgctatcgccggatgagaaaccggatatcagctactccgacattggaggcttggacatccagaaacaggagatacgcgaggctgtcgagctgcccttgacccacgcccagctttacaagcaaattggcatcgatcccccacgcggcgtcctcctttttggaccacctggatgtggcaaaaccatgctggccaaggcggtggcccatcatacaactgcatcatttattcgtgtcgtgggctccgagttcgtccagaaatacctaggcgaggggccacgcatggtgcgagatcttttccgcctggccaagcagaattctccttcaattatcttcattgatgagatcgatgcgattgccaccaagcgctttgatgcacagacaggtgctgatcgcgaggtgcagcgcatcctgctggagctactcaaccaaatggatggctttgatgagaccaccaacattaaggttatcatggccaccaatcgtgcagataccttagatccggctctgttacgacccggccgtttggatcggaaaattgagttaccattgccggatcgtcgccagaagcgcttagttttcaccacaatcacctcgaaaatgaatgtgggtgaggatgtggatctggaggacatcattgcacgtccggacaagatctccaatgcggatatcaatgccatttgccaagaggctggtatgcatgcagtgcgcgagaatcgctatgtggtcaatgccaaggacttcgaaaagggttataagaccagcgtgcgcaaggacgaagctcagcatgagttctatagctag

SEQ ID NO: 5401 - protein, 389 aa, Drosophila melanogaster
MRLLKEEIAQFHEQSLEKYDGLDPHDLYVLYKKLQMELELIQFIHAQEEVKRIKAVPLVIGQFLEAVDENNGIVASTTGSNYYVRVLSTIDREQLKPSSSVGLHKQSNCLVDLVPPEADSTISMLSPDEKPDISYSDIGGLDIQKQEIREAVELPLTHAQLYKQIGIDPPRGVLLFGPPGCGKTMLAKAVAHHTTASFIRVVGSEFVQKYLGEGPRMVRDLFRLAKQNSPSIIFIDEIDAIATKRFDAQTGADREVQRILLELLNQMDGFDETTNIKVIMATNRADTLDPALLRPGRLDRKIELPLPDRRQKRLVFTTITSKMNVGEDVDLEDIIARPDKISNADINAICQEAGMHAVRENRYVVNAKDFEKGYKTSVRKDEAQHEFYS

SEQ ID NO: 5402 - DNA, 1110 bp, Nanoarchaeum equitans Kin4-M
  CDS (1)..(1110): transl_table=11
atggatgaaaaagaaatagaggaaatactagaggaaaataaaaggctaaaatctatggtaaattatttgcaaaaagaattagaaaaatttagaagtccccccttagttgtagcagaagtaataaagccttatggagaaagagcaatcgtaagattgccaacgggtatggaattgttagtggaaaagctatcaaaaatagaaatagagccaggggatactgtatttctaaaccaatctaatatggttattgtaggcaaagcagaaaaaaggaaaaaattcaacatcgatgcttttgttattactgagaaaccaaatgtagattggtctcaaattggtgggcttaaagagcaaatcgaagaaattagagaggcaattgaattaccattaactaaaccagagatattcgaaaaaataggtatagaacctccaaaaggtgttctattgtatggcccccctggaactggtaaaacattaataggaaaagctttagccaaatccgctaatgccacttttatatatatagtaggttctgagctagttcaaaaatatattggagagggtgcaaaactagttaaagaattgtttgattatgctagggagcacgccccagcgatagtttttattgatgaaatagatgctatcgctgctagaagaatagagactggcacttctggagaaagagaagtacaaagaacttttatgcagcttttagcagaaatagatggttttaaacctttagataaggtaaaggttattggtgcaaccaatagattagatatattagatcctgctatattaagacctggcagattcgatagaataatacatattcctttgcctgacaaacaaggaagaatagaaatattcaaaatacatactaggaaaatgagaactaaagacatagattattcattattagcagagttaaccgaaggttttagcggggcagagataaaacaagtttgtatagaagcaggttatttggcgataagaaataaaagggattatgttatattagaggatttcataaaagcgatagacaaagtaaagaaaatgcgtaaaaaagaggaataccaacgctttttaaaaggtttatcttatttcggctaa

SEQ ID NO: 5403 - protein, 369 aa, Nanoarchaeum equitans Kin4-M
MDEKEIEEILEENKRLKSMVNYLQKELEKFRSPPLVVAEVIKPYGERAIVRLPTGMELLVEKLSKIEIEPGDTVFLNQSNMVIVGKAEKRKKFNIDAFVITEKPNVDWSQIGGLKEQIEEIREAIELPLTKPEIFEKIGIEPPKGVLLYGPPGTGKTLIGKALAKSANATFIYIVGSELVQKYIGEGAKLVKELFDYAREHAPAIVFIDEIDAIAARRIETGTSGEREVQRTFMQLLAEIDGFKPLDKVKVIGATNRLDILDPAILRPGRFDRIIHIPLPDKQGRIEIFKIHTRKMRTKDIDYSLLAELTEGFSGAEIKQVCIEAGYLAIRNKRDYVILEDFIKAIDKVKKMRKKEEYQRFLKGLSYFG

SEQ ID NO: 5404 - DNA, 1428 bp, Ashbya gossypii ATCC 10895
  CDS (1)..(1428)
atgtttagattcgccttaagctatactacactgctacaccgtcagacgatcacaagggactacgcaatgccgcctaaggaagactgggagaagtataaagcaccggtggagaccgaggaggagcagaaacaggcggatgagaagatcaaacctctctccgaaggagatatccaagtgttgaagacctatggagccgctccatacgcggcgaagctcaaatccacggagaaagacctcaaggatatcgagcagcggatcaaggagaaggctggcgtcaaggagagcgatacaggccttgcgccatcgcacctgtgggacataatgggcgaccggcagaaactaagcgaaagacatccgctacaggtggccaggtgtacgaagatcatccggtcaaacccctcggccgacgcgagccggagcggtgcgaacacgggtgaggatgacgaggatgccaagtatgtgataaatttaaaacagattgctaagtttgttgtgggccttggagagcgcgtttcgcccacagatatagaggagggcatgcgtgttggtgtggacaggtccaagtatttcatcgagctacctttgcctccgcggattgaccccagtgtgactatgatgacggtggaggagaaaccagatgtgacgtattcagatgtaggtgggtgtaaggagcagatagagaagctgcgtgaggttgtggagctgcccctactctcccccgagagatttgcgactctgggcattgatccaccaaagggtattttactatatgggcctccggggacaggtaagacactttgtgcccgtgccgtggccaacaggaccgatgctacatttatcagagtcattggctccgaattagtacagaagtacgtcggtgaaggtgctagaatggttagagagttgtttgaaatggccagaacaaaaaaggcatgtattattttcttcgacgaagtggacgcaattggcggtgctcgttttgacgatggagcgggtggtgacaatgaggtccaaagaactatgttggaactcattacgcaactagacggattcgatccacgtggtaatatcaaggtgatgtttgctaccaataggccgaacaccttagacccagcattgttgagacccggtagaatagaccgtaaggtagaattctctcttccggatttggaaggccgtgccaatattttccgcattcacacaaagtccatgagtgttgagcgtggtattagatgggaattgatttccaggttgtgtccaaactccaccggcgctgaactaagatctgtttgcacagaggctggcatgtttgcaatcagatccagacgcaaggtagctacagaaaaggacttcttaaaagctgtggataaggtcatcaacggctataagaaattcagctccacttcccgttatatgcaatacaactga

SEQ ID NO: 5405 - protein, 475 aa, Ashbya gossypii ATCC 10895
MFRFALSYTTLLHRQTITRDYAMPPKEDWEKYKAPVETEEEQKQADEKIKPLSEGDIQVLKTYGAAPYAAKLKSTEKDLKDIEQRIKEKAGVKESDTGLAPSHLWDIMGDRQKLSERHPLQVARCTKIIRSNPSADASRSGANTGEDDEDAKYVINLKQIAKFVVGLGERVSPTDIEEGMRVGVDRSKYFIELPLPPRIDPSVTMMTVEEKPDVTYSDVGGCKEQIEKLREVVELPLLSPERFATLGIDPPKGILLYGPPGTGKTLCARAVANRTDATFIRVIGSELVQKYVGEGARMVRELFEMARTKKACIIFFDEVDAIGGARFDDGAGGDNEVQRTMLELITQLDGFDPRGNIKVMFATNRPNTLDPALLRPGRIDRKVEFSLPDLEGRANIFRIHTKSMSVERGIRWELISRLCPNSTGAELRSVCTEAGMFAIRSRRKVATEKDFLKAVDKVINGYKKFSSTSRYMQYN

SEQ ID NO: 5406 - DNA, 1314 bp, Ashbya gossypii ATCC 10895
  CDS (1)..(1314)
atgggccaaggagcatcgacgtatggcaagggccagaagggcaaaaaggacaagaaacagaagccgaagtatgagcccccagtacagtccaagatcgggcgcaagaagaggaagggacctgccacggcagagaagttgccgaacgtgtatcccagcacgcgatgcaagctgaagctgctgcggatggagcggatcaaggatcacctgctgctggaagaggagttcgtgacgaactcggaaatcctgaagccgttcgagatgaagcaggaggaggagcgcaagcagctggaagagatccgcggcacaccgctgtcgattggcacgctggaggagataattgacgacgaccacgcgattgtgacgagcccgacgacgccagacttctacgtgagcatcttgtcgtttgtcgacaaggagctgttggagcctgggtgctcggtgctgctgcatcacaagaccatgtcgattgtgggagtattacaggacgacgccgacccgatggtgtcggtgatgaaaatagacaagtcgcctacggagtcctacaacgacatcggcgggttggaggcgcagatccaggagattaaagaggcggtggagctgcctttgacgcaccccgagttgtacgaggagatggggatcaagccgcccaagggcgtcatcctgtatggcgcgccggggactggcaagacgctgctggcgaaggcggtggccaaccagacgtccgccaccttcctgcgcatcgtgggctcagagctcatccagaaatacctcggtgatggcccgcggctgtgccgtcagatctttaaagtggctgccgagaacgcccccagcatagtcttcatcgacgagatcgacgcaattggcacaaagcgctacgactccaacagcggcggagagcgcgaaatccagcgcaccatgctggagctgctcaaccagctcgacggcttcgacgaccgcggcgacgtcaaggtaataatggccactaacaagatagagagcctggaccccgcgctgatcagacctggcagaatagaccgcaaaatcctgtttgaaaaccccgacgtctcgaccaagcgcaagatcctcggcatccacacctcgaagatgaacctcagcgccgacgtcgacctggagaccctggtcacctccaaggacgacctctccggcgcagacatcaaggccatgtgcacagaagccggcctgctcgcgctgagagagcggcgcatgcaggtcacagtcgaggacttcaagcaggcaaaggagcgtgtgatgaagaacaaggtggaagagaatctcgagggcctctacttgtga

SEQ ID NO: 5407 - protein, 437 aa, Ashbya gossypii ATCC 10895
MGQGASTYGKGQKGKKDKKQKPKYEPPVQSKIGRKKRKGPATAEKLPNVYPSTRCKLKLLRMERIKDHLLLEEEFVTNSEILKPFEMKQEEERKQLEEIRGTPLSIGTLEEIIDDDHAIVTSPTTPDFYVSILSFVDKELLEPGCSVLLHHKTMSIVGVLQDDADPMVSVMKIDKSPTESYNDIGGLEAQIQEIKEAVELPLTHPELYEEMGIKPPKGVILYGAPGTGKTLLAKAVANQTSATFLRIVGSELIQKYLGDGPRLCRQIFKVAAENAPSIVFIDEIDAIGTKRYDSNSGGEREIQRTMLELLNQLDGFDDRGDVKVIMATNKIESLDPALIRPGRIDRKILFENPDVSTKRKILGIHTSKMNLSADVDLETLVTSKDDLSGADIKAMCTEAGLLALRERRMQVTVEDFKQAKERVMKNKVEENLEGLYL

SEQ ID NO: 5408 - DNA, 1419 bp, Ashbya gossypii ATCC 10895
  CDS (1)..(1419)
atgacttttgtaaaccttagaagcgctgggtggcaaaatcccaaggagaatgaatcacagttagtatctatagagcaccttcacaacacagggcatctgtcgtatcctgatctttgggtcaagcacaccatggaagaactcggtattggtcaaagtggcgaggtagcggtcgaaaggcccgtagccctatcatatgggtctctggtttcgcacatcaacagcaacacggcggcattgaacagttctaacgcagacgtgtacttgaaattgaagaagctcgaacgagagtacgagctgctcaccctgcaggaggattacattaaggacgaacagcgccatctgaagcgcgagttgttgagagcgcaggaggaggttaagcgcatccaatctgttccgctggttattggacagttcttggagcccatcgatgagagcacgggtattgtatcgagcactacaggtatgagctacgttgtgcgaatcctctcgactctggatcgggagctgttgaagccgtcgacgtcggtggctctccatagacattccaacgcgctggttgatatcctaccgccagactcggactccagcatttctattatggggaacaacgagaagccggacgtgacatatgcagatgtcggtggcttggatatgcagaagcaggaaatccgggaggctgtagaattgcccttggtccaggcagacctgtatcagcaaattggcatagaccctccgcgcggtgtgctgctatacgggcctcctggtacgggtaagacgatgttggtgaaggcggtggcgaatagtaccaatgcagctttcatcagagtcaacggctctgagtttgttcacaagtaccttggagaaggtcccaggatggtgcgcgatgtcttccgcttggcgagagagaatgccccgtcgattattttcattgatgaagttgattcgattgccacgaaacgttttgacgcccagacgggctccgatagagaggtgcagcgtattctgatcgagctactaacacaaatggatggctttgatcagagcactaatgtcaaagttatcatggcaaccaacagacatgatacgctggaccctgctttgttgagacctggtagacttgacaggaaaattgagttcccatctctgcgcgacagacgtgagcggcgtctcatttttggaacgattgcagccaaaatgtccttagctccggaggtcgacttggactcgttgatcataagaaacgatccactatcgggtgcgttgatcgcagctattatgcaagaagctggcttacgagctgtgaggaaaaacagatatgtcattctccagagtgatttggaggaggttacgcatcacaagtcaagacgggcagcgatgtcgacaagttcgatttctataaatgaggtaagcgaagtctaa

SEQ ID NO: 5409 - protein, 472 aa, Ashbya gossypii ATCC 10895
MTFVNLRSAGWQNPKENESQLVSIEHLHNTGHLSYPDLWVKHTMEELGIGQSGEVAVERPVALSYGSLVSHINSNTAALNSSNADVYLKLKKLEREYELLTLQEDYIKDEQRHLKRELLRAQEEVKRIQSVPLVIGQFLEPIDESTGIVSSTTGMSYVVRILSTLDRELLKPSTSVALHRHSNALVDILPPDSDSSISIMGNNEKPDVTYADVGGLDMQKQEIREAVELPLVQADLYQQIGIDPPRGVLLYGPPGTGKTMLVKAVANSTNAAFIRVNGSEFVHKYLGEGPRMVRDVFRLARENAPSIIFIDEVDSIATKRFDAQTGSDREVQRILIELLTQMDGFDQSTNVKVIMATNRHDTLDPALLRPGRLDRKIEFPSLRDRRERRLIFGTIAAKMSLAPEVDLDSLIIRNDPLSGALIAAIMQEAGLRAVRKNRYVILQSDLEEVTHHKSRRAAMSTSSISINEVSEV

SEQ ID NO: 5410 - DNA, 1224 bp, Methanococcus maripaludis S2
  CDS (1)..(1224): transl_table=11
atgagttacccagatgattattccacagatatagaaaaaaataaaatggatttaaaagaatttaaagaaaaaactcagatcgcagagttagaaagtaaagtattgagattggaattaaaaaataaagatattaatagagagaatgtacaaattaaaaaagaaaatgaaatattaaagcgagaacttgataaattaagaattccaccactcatacttggtacaatacttgataaagtaaatgaaagaaaagcggttgttaaaagttctacaggaccaaacttccttgtaaacctttcacaattcgtagatcctgaagacattgttccaggagcaagagtttgtttaaaccagcagactttagcaatcgttgaagtactgcctaaagaaaaagattaccgagctatggcaatggaaattgaggaaaaaccagacatttcctttgaagatatcggtggtttaaacaaccagattagagacattaaagaagtagttgaacttcctcttaaaaacccagaattattcgaaaaagtaggtattgttccaccaaaaggagtattactctacggtccgccaggaactggaaaaactttgcttgcaaaagctgttgcatacgaaaccaatgcatcatttgttagagttgtcggctcagaactcgtcaaaaaattcattggagaaggtgcaaaacttgtaagagatgttttcaaacttgcaaaagaaaagtcaccttgcattatatttattgatgaaatcgatgcagttgcaagcaaaagaactgaatcattaactggtggagacagagaagttcaaagaactttaatgcagcttcttgcagaaatggatggttttgattcgagaggcgatgtaaaaatcattgctgcaacaaacaggcctgacattttagatcctgcaatactcaggcctggaagattcgatagaatcattgaaatttcaatgcctgatgaagatggaagactcgaaatcttaaaaatccacactgaaaaaatgaaccttaaaggcgtggacttaagagaagttgcaaaaattgcagaaaacatggttggtgctgacttaaaagcagtttgtactgaagctggtatgtttgcaataagagaagaaagagaattcatcaaaatggatgacttcagagaagctatctcgaaaattacaggtaaaaaagaaaaatgcagttacgacatgccacaattaaccgtaatgtacggataa

SEQ ID NO: 5411 - protein, 407 aa, Methanococcus maripaludis S2
MSYPDDYSTDIEKNKMDLKEFKEKTQIAELESKVLRLELKNKDINRENVQIKKENEILKRELDKLRIPPLILGTILDKVNERKAVVKSSTGPNFLVNLSQFVDPEDIVPGARVCLNQQTLAIVEVLPKEKDYRAMAMEIEEKPDISFEDIGGLNNQIRDIKEVVELPLKNPELFEKVGIVPPKGVLLYGPPGTGKTLLAKAVAYETNASFVRVVGSELVKKFIGEGAKLVRDVFKLAKEKSPCIIFIDEIDAVASKRTESLTGGDREVQRTLMQLLAEMDGFDSRGDVKIIAATNRPDILDPAILRPGRFDRIIEISMPDEDGRLEILKIHTEKMNLKGVDLREVAKIAENMVGADLKAVCTEAGMFAIREEREFIKMDDFREAISKITGKKEKCSYDMPQLTVMYG

SEQ ID NO: 5412 - DNA, 1170 bp, Aspergillus terreus NIH2624
  CDS (1)..(1170)
atggcgctcgacaactactatcgcaataagatcgagagcatgaagctcgagattatccagggccaggcagtcctccgacgattggaagcacagcggaatgactataactcgagagtgcgcctcctccgcgaggaactcggcctccttcaacagcccggctcctacgtcggtgaggtggtgaaagtgatgagtacgaagaaggttctcgtgaaagtgcaccccgaaggaaaatacgtcgttgatattgccgatggcgtcgacatctcgaagctcaccgtgggcaagcgtgtggccctgctgtccgactcctacaagctggaaaagatgctgccatcgtctgtcgatccgctagtgtcgctcatgatggtggagaaggttccggatagcacatacgacatgatcggaggtctggaccagcagatcaaggaaatcaaggaagtcatcgagctgggtctgaagcatccggaactgtttgaatccctcggtatcgcacagccgaaaggtgtccttctttacggtcccccgggaaccggcaaaaccctcctggctcgagcggtggcccatcatacagactgtcggtttatccgagtgagtggttcggaactggtgcagaagtatatcggtgagggtagccgcatggtgcgtgagctgttcgtcatggcccgtgagcatgctcccagcattatcttcatggacgagatcgacagcatcggttccagtcggatagactctgcgggcggtggtgattcggaagtccagcggactatgttggagctgctgaaccagctggatgggtttgagccgacaaagaacatcaaaattatcatggccactaaccgacttgacatcctggacccggctcttctgcgtcctggacgaatcgaccgaaagattgagttccccccgccgtcggtcgaagctcgtgcggatattctacggatccactcgcgttcgatgaacctcactcgaggcatcaaccttacgaagatcgccgagaagatgaacggatgctctggagccgaattgaagggagtgtgtaccgaggccggcatgtatgcccttcgggagcgtcgggtgcatgttacgcaagaggactttgacttggccaccgccaagatcctcaacaagcatgatgacaaggaggtggctgtctccaagttgttcaagtag

SEQ ID NO: 5413 - protein, 389 aa, Aspergillus terreus NIH2624
MALDNYYRNKIESMKLEIIQGQAVLRRLEAQRNDYNSRVRLLREELGLLQQPGSYVGEVVKVMSTKKVLVKVHPEGKYVVDIADGVDISKLTVGKRVALLSDSYKLEKMLPSSVDPLVSLMMVEKVPDSTYDMIGGLDQQIKEIKEVIELGLKHPELFESLGIAQPKGVLLYGPPGTGKTLLARAVAHHTDCRFIRVSGSELVQKYIGEGSRMVRELFVMAREHAPSIIFMDEIDSIGSSRIDSAGGGDSEVQRTMLELLNQLDGFEPTKNIKIIMATNRLDILDPALLRPGRIDRKIEFPPPSVEARADILRIHSRSMNLTRGINLTKIAEKMNGCSGAELKGVCTEAGMYALRERRVHVTQEDFDLATAKILNKHDDKEVAVSKLFK

SEQ ID NO: 5414 - DNA, 1386 bp, Aspergillus terreus NIH2624
  CDS (1)..(1386)
atgtctaccctggaggatctcgacgaccttgagcgtgaagagagaaagaagccggaccagggcgatggcgacggcaagaagcccgacggcgatggcgacgccgaaatgaaagatgcggaaaagaaagaggaggaggaacagcttctagatgaggagattctcaactcgagcacagcggacatcgtcaagcgacgacggatgctggagaacgaactccgcataatgaagagcgaattccaacggttgacgcacgaacagagcacgatgagagagaaggtgaaggacaaccaggagaagatcgagaacaacaggcaactaccatatctcgtcggaaacgttgtcgaactcctggatctggatgttgaggctgaggccgccgaagaaggagccaacatcgacttggacgctacccgggtcggcaagtcggccgtcatcaaaacgtctacccgtcagactatctacctcccgctcatcggtctagtagaccacgagaagctgaagcccggtgatctgatcggtgtgaacaaggactcatatctggtcctggacacgctaccggctgagtacgacaaccgcgtgaaagccatggaggtcgacgagaagccgacggagaagtacacggacatcggaggcttggacaagcagatcgaggagatcgtcgaggccatcgtatggccgatgaaggaggccgaccggttcaagaagatcggtatcaaggcaccgaagggcgctctgatgtacggacctcccggaacgggtaaaaccctgctcgctcgagcctgcgccgccgagacgaacgccaccttcctcaagctcgccggtccccagctggtgcagatgttcatcggagacggcgccaagctcgtccgcgactgcttcgcgctggccaaggaaaaggcgccgtcgatcatcttcatcgacgaactggacgccgtcggcaccaagcgtttcgactcggaaaagtccggtgaccgtgaagtgcaacgcaccatgctggagctcctcaaccagctggatggcttcgcctccgacgaccgcatcaaggtgcttgccgccacgaatcgtgtcgacgtcctcgatcccgccctgctccggtccggtcgtctggaccgcaagatcgagttccccctgcccaacgaggaggcccgcgccaacatcctgcagatccactcgcgcaagatggccgtcgaggacacggtcaactggcccgagctggcccgcagcacggacgagttcggtggcgcccagctcaaggccgtgtgcgtcgaggccggtatgatcgcgctgcggaagggtatgtccaaggtgggccacgagaactacgttgatgccattgccgaagtgcaggccaagaagaaggacacaaacatgggaatctatgtttaa

SEQ ID NO: 5415 - protein, 461 aa, Aspergillus terreus NIH2624
MSTLEDLDDLEREERKKPDQGDGDGKKPDGDGDAEMKDAEKKEEEEQLLDEEILNSSTADIVKRRRMLENELRIMKSEFQRLTHEQSTMREKVKDNQEKIENNRQLPYLVGNVVELLDLDVEAEAAEEGANIDLDATRVGKSAVIKTSTRQTIYLPLIGLVDHEKLKPGDLIGVNKDSYLVLDTLPAEYDNRVKAMEVDEKPTEKYTDIGGLDKQIEEIVEAIVWPMKEADRFKKIGIKAPKGALMYGPPGTGKTLLARACAAETNATFLKLAGPQLVQMFIGDGAKLVRDCFALAKEKAPSIIFIDELDAVGTKRFDSEKSGDREVQRTMLELLNQLDGFASDDRIKVLAATNRVDVLDPALLRSGRLDRKIEFPLPNEEARANILQIHSRKMAVEDTVNWPELARSTDEFGGAQLKAVCVEAGMIALRKGMSKVGHENYVDAIAEVQAKKKDTNMGIYV

SEQ ID NO: 5416 - DNA, 1395 bp, Aspergillus terreus NIH2624
  CDS (1)..(1395)
atgggtaaccagcagtccaacatcccccccggtggcgatggaagagatgagaaggacaagaagcttcgttttcagaaggataagcccagatatgagcctcctcccccgccgacgacccgtgttggtcgcaagaagcgcaaggctgccggcccaagcaccgcttccaaacttcccgatatcttcccaacgtcacgttgtaaattacgatatttacgaatgcaacgcgtgcacgaccacctgctgttagaggaagaatacgttgagaacatggagcgtctacggaaggccaaagcgcaggcaacacaggatgcaaaccgcggggagttcgatatcatggaccgcaacgctgacgaaagaggccgagtcgatgacatgagaggtaccccgatgggtgttggaaacctggaggagcttatcgacgacgaccatgcgatcgtctcgagtgccactggtcccgaatactatgtgtctatcatgtcgttcgtggacaaggatcttctcgagcccggtgccagcattctcctgcatcacaagtcggtgtccgtggttggtgtattgaccgaggagtcggacccactcgtgtcggtcatgaagctcgacaaagcccccactgagtcgtatgcggacattggtggtttggagacacagatccaggaagttcgggagtctgtcgaacttcccctgcttcaccccgagttgtacgaggagatgggtatcaagccacccaaaggtgttatcctttacggcgctcccggtaccggaaagaccctgctcgccaaggcagttgccaaccaaaccagcgctactttccttcgtatcgttggaagtgaactgattcagaaataccttggtgacggtcctcgcttggtgcgacagatcttccaggtcgccgcggaacacgcaccttccatcgtttttatcgatgagattgatgccatcggtacgaaacgttatgactccacttcgggtggtgagcgtgagattcagcgaaccatgcttgaactgttgaaccagctcgatggtttcgatgaccgtggtgacgttaaggttatcatggccacgaacaagatcgaaactctggatccggctttgatccgtcccggacgtatcgatcgtaagatcctcttcgagaaccctgatcaaaacaccaagaagaagatcttcaccctgcacacctcgaagatgtcccttggagacgatgttgacctggatgagttcatcaaccagaaggatgacctgtctggagccgatattcgggcgatttgcacagaagccggtctgatggcactgagagagcgtcggatgcgcgtgcagatggaggacttccgtgcagctcgcgagcggatcatgaagacgaagcaggacggaggccctgtggagggactgtacttgtaa

SEQ ID NO: 5417 - protein, 464 aa, Aspergillus terreus NIH2624
MGNQQSNIPPGGDGRDEKDKKLRFQKDKPRYEPPPPPTTRVGRKKRKAAGPSTASKLPDIFPTSRCKLRYLRMQRVHDHLLLEEEYVENMERLRKAKAQATQDANRGEFDIMDRNADERGRVDDMRGTPMGVGNLEELIDDDHAIVSSATGPEYYVSIMSFVDKDLLEPGASILLHHKSVSVVGVLTEESDPLVSVMKLDKAPTESYADIGGLETQIQEVRESVELPLLHPELYEEMGIKPPKGVILYGAPGTGKTLLAKAVANQTSATFLRIVGSELIQKYLGDGPRLVRQIFQVAAEHAPSIVFIDEIDAIGTKRYDSTSGGEREIQRTMLELLNQLDGFDDRGDVKVIMATNKIETLDPALIRPGRIDRKILFENPDQNTKKKIFTLHTSKMSLGDDVDLDEFINQKDDLSGADIRAICTEAGLMALRERRMRVQMEDFRAARERIMKTKQDGGPVEGLYL

SEQ ID NO: 5418 - DNA, 1266 bp, Chaetomium globosum CBS 148.51
  CDS (1)..(1266)
atgggcgacgtcctggtcgagaacgccgccaacagcatccagcccctcaagaagcataccccctccactatccccagtatcgagaactttgagggcgtatcaacagaaggcggcgatgagtatgcgaacctgaagcggctgcagcgacagctcgagtatatccagttgcaggaagaatacatcaaggatgagcagaggagcttgaagcgggagctggtccgggcacaggaggagatcaagcgcatccagagtgtaccgcttgtcatcggccagtttatggaggccattgaccagaataccggcatcgttcagtctagcactggatccaactacgtcgtccgtatcctgtcgacgctggaccgcgagctgctcaagccctcctcctcagtcgccctgcaccgccactccaatgcccttgtcgatatcctcccgcccgaggcggactcctcgatcgccatgctcggggccgacgagaagcccgacgtgacgtacgccgacgtcggtgggctggacatgcagaaacaggaaatccgcgaagccgtcgagcttcccctgacacacttcgacctgtacaagcagatcggtatcgacccaccccgcggtgtgctactgtacggcccaccgggaaccggcaagaccatgctggtgaaggcggtagccaactcgacgacggccaacttcatccgggtggtcgggtccgagttcgtacaaaagtaccttggcgagggcccgcggatggtgcgcgacgtgtttaggatggcgcgcgagaacgcgcccgccatcatcttcatcgacgagatcgacgccatcgcgaccaagcgtttcgacgcacagacgggcgccgatcgcgaggtgcagcgtatcctactcgagctgctcaaccagatggacggcttcgaccagacggccaacgtcaaggtcatcatggcgaccaaccgggccgacacgctcgacccggcactgctccggcccggccgcctcgaccgtaagatcgagttccccagcctgcgcgaccgccgcgagcgccgcctcatcttcaccaccatcgccagcaagatgagcctcgcccccgaggtcgacctcgacagcctcatcgtccgcaacgaccccctcagcggcgccgtcatcgccgccatcatgcaggaggctggcctgcgcgccgtgcgcaagaacagatataacatcatccaggtcgatctggaggacgcctacagcagccaggtcaaggggtcgagcgacgagaacaagtttgatttctacaaataa

SEQ ID NO: 5419 - protein, 421 aa, Chaetomium globosum CBS 148.51
MGDVLVENAANSIQPLKKHTPSTIPSIENFEGVSTEGGDEYANLKRLQRQLEYIQLQEEYIKDEQRSLKRELVRAQEEIKRIQSVPLVIGQFMEAIDQNTGIVQSSTGSNYVVRILSTLDRELLKPSSSVALHRHSNALVDILPPEADSSIAMLGADEKPDVTYADVGGLDMQKQEIREAVELPLTHFDLYKQIGIDPPRGVLLYGPPGTGKTMLVKAVANSTTANFIRVVGSEFVQKYLGEGPRMVRDVFRMARENAPAIIFIDEIDAIATKRFDAQTGADREVQRILLELLNQMDGFDQTANVKVIMATNRADTLDPALLRPGRLDRKIEFPSLRDRRERRLIFTTIASKMSLAPEVDLDSLIVRNDPLSGAVIAAIMQEAGLRAVRKNRYNIIQVDLEDAYSSQVKGSSDENKFDFYK

SEQ ID NO: 5420 - DNA, 1170 bp, Coccidioides immitis RS
  CDS (1)..(1170)
atggcgcttgacaactacttccgcaacaagatagagagcatgaagctcgaaatcatcaagggccaggctgttttgagacgattagaagcacagagaaatgattacaactcgagagtacggctattacgggaggaattgggcttattgcaacagcctggttcgtacgtcggtgaggttgtgaaggtgatgtcgacgaaaaaggttttggtcaaagtccatccagaaggcaaatacgtcgtcgatgttgccgatggtgtcgatattgcaaaacttacggttggcaaacgtgtgtcattaatgtccgactcgtacaagctagagaagatgctaccttcgtccgttgaccccctcgtctcccttatgatggtcgaaaaagtaccggatagtacatacgatatgatcggaggtcttgaccagcaaatcaaggagattaaagaagtgatcgagcttggtttgaagcaccccgagctctttgaatccttaggtatcgcccagccaaagggtgtcctgttatatgggcccccaggaactgggaaaacgcttctggctcgagcggttgctcaccacacggactgcaaattcattcgcgtcagtggatccgagctagtgcagaagtatattggtgaggggagtagaatggtccgagagctgtttgtcatggcaagagaacatgcacccagcatcatatttatggacgaaatcgatagcattggatcgagtcgtgtggaagggagcagtggaggtgattctgaggtacagagaacgatgttggaacttctcaaccaattagatggttttgagccgacaaagaacattaaggttattatggcgacgaatcgcttggatatccttgaccctgcccttctccgaccgggacggatcgatagaaagattgagttcccaccaccgagtgtcgaggcacgtgcagacatcctccgaatccactcccgctcgatgaaccttacccgtggaataaatctgacaaagatagcggagaagatgaacgggtgctcaggcgcagaactcaagggagtttgcaccgaagcagggatgtatgccctacgagagcgacgtgtacatgttacgcaagaagacttcgaccttgcgacagcgaagatcctcaacaagcatgacgacaaggaggtcagtcttggaaaactctggaagtag

SEQ ID NO: 5421 - protein, 389 aa, Coccidioides immitis RS
MALDNYFRNKIESMKLEIIKGQAVLRRLEAQRNDYNSRVRLLREELGLLQQPGSYVGEVVKVMSTKKVLVKVHPEGKYVVDVADGVDIAKLTVGKRVSLMSDSYKLEKMLPSSVDPLVSLMMVEKVPDSTYDMIGGLDQQIKEIKEVIELGLKHPELFESLGIAQPKGVLLYGPPGTGKTLLARAVAHHTDCKFIRVSGSELVQKYIGEGSRMVRELFVMAREHAPSIIFMDEIDSIGSSRVEGSSGGDSEVQRTMLELLNQLDGFEPTKNIKVIMATNRLDILDPALLRPGRIDRKIEFPPPSVEARADILRIHSRSMNLTRGINLTKIAEKMNGCSGAELKGVCTEAGMYALRERRVHVTQEDFDLATAKILNKHDDKEVSLGKLWK

SEQ ID NO: 5422 - DNA, 1392 bp, Coccidioides immitis RS
  CDS (1)..(1392)
atgggaaatcaaccatcccagatgggcggtggccccccggggggcgacgggaaagacgagaaggacaagaaaaaggaaaagccaaagtacgaacctcctccacagcccacgactagaatcgggcgtaagaaacgtaaggctgctggccccaatgccgctgccaaactccctacgatattcccgacttcacggtgcaaactgcgatacctccgaatgcagcgggtccacgatcatttgatattggaagaggagtatgtcgagaatcaggaacgtctccgcaagacgaaggctcaagcgtcggcggcgccctcggccagtgatgactttgatgctttggatcgaaatgcggatgagaggagccgcgtcgatgatatgagagggagcccgatgagcgttggcaatctcgaggagatgatcgatgacgatcatgcaatcatctctagcgccacgggtcccgagtactacgtgtctatcatgtctttcgtggacaaggacctacttgagcctggcgccagcatcctcctacatcacaaatcggtatcggttgttggcgtgttgaccgatgacgcggatcctctggtgtctgttatgaaattggacaaagcacccacagaatcgtacgcagatattggagggttggagtcgcagattcaagaggttcgagaagccgttgagttaccgttactacacccagagctatacgaggagatgggtatcaagcccccgaaaggtgtcattctctatggaggaccaggcacaggaaagaccctacttgccaaagctgtcgccaaccaaaccagtgctaccttccttcgtattgttggtagcgagttgattcagaaataccttggtgatggtccacggttagtccgtcaaattttccaggttgctgcagagcacgccccgtctatcgtgttcattgatgaaatcgatgccatcggaacaaagcgttacgaatccacttccggtggcgagcgggaagttcaacgtaccatgttagaacttcttaatcagcttgatgggttcgatgaccgtggcgatgtaaaggtcatcatggccaccaataaaatcgagactttagacccggccttgattcgacctggccgtatcgaccgcaagattcttttcgaaaacccagatcaaaacaccaaaaagaagatttttgctctccatacgtccaaaatgtctctcagcgacgacgtagatctggatgagttcattagtcaaaaggacgacctttctggcgcggatatcaaagctatctgctctgaggcagggttgatggctctccgagagcggcgaatgcgagttcaaatggcggactttagagctgctagggagcgcgtgatgaagacgaagagtgagaacgagcctgagggcctctacttgtag

SEQ ID NO: 5423 - protein, 463 aa, Coccidioides immitis RS
MGNQPSQMGGGPPGGDGKDEKDKKKEKPKYEPPPQPTTRIGRKKRKAAGPNAAAKLPTIFPTSRCKLRYLRMQRVHDHLILEEEYVENQERLRKTKAQASAAPSASDDFDALDRNADERSRVDDMRGSPMSVGNLEEMIDDDHAIISSATGPEYYVSIMSFVDKDLLEPGASILLHHKSVSVVGVLTDDADPLVSVMKLDKAPTESYADIGGLESQIQEVREAVELPLLHPELYEEMGIKPPKGVILYGGPGTGKTLLAKAVANQTSATFLRIVGSELIQKYLGDGPRLVRQIFQVAAEHAPSIVFIDEIDAIGTKRYESTSGGEREVQRTMLELLNQLDGFDDRGDVKVIMATNKIETLDPALIRPGRIDRKILFENPDQNTKKKIFALHTSKMSLSDDVDLDEFISQKDDLSGADIKAICSEAGLMALRERRMRVQMADFRAARERVMKTKSENEPEGLYL

SEQ ID NO: 5424 - DNA, 1389 bp, Coccidioides immitis RS
  CDS (1)..(1389)
atgtctacgctcgaagagctcgaagatcttgagcgcgaagataaggataagagaaaggagcaagaggaacgtgatggacagaaatccgacaaggatggggacgcagaaatgaaagatgcggatcaaaagaaagaggaagacgacctgctagatgaggagatcttacggtcaagcacgcgagatatcataaaccgacggaagttgctggacaatgatatgcgcattatgaagagcgagtatcaacgattgatgcacgagcagaataccatgaaggagaagataaaggacaatcttgacaaaattgagaataatcggcaattaccatacctagtcgggaatgtcgttgagcttctagatcttgacgtcgagaaggaagcagttgaagaaggtgccaatatagacctggacgcaactcgtgttggcaaatcagccgtcattaagacatccactcgccaaacaatcttcctccctcttattggcctcgttgaccatgaaaagctcaaacctggtgacttgataggggtgaataaggactcctaccttgtcctggacacacttccagcagaatacgatagccgagtaaaagcgatggaagttgatgagaaaccaacagagcaatataccgacgttggtgggctcaacaagcagattgaggaattagtggaagctatagtttggccgatgagagaggctgaacggttcaaaaaaatcgggatcaaagctccgaaaggtgcgctcatgtatggcccacccggtactggtaagactcttcttgccagagcttgtgctgcccagacagacgctacattcctgaaactcgctggtccccaactcgtccaaatgtttattggtgacggcgccaagctcgtccgtgactgctttgctcttgccaaagagaaagcacccgctatcatcttcatcgacgagctcgatgccgtcggcacgaaacgttttgattctgaaaagtctggtgatcgtgaagttcaacgtacgatgttggaactcctcaatcagcttgacggtttcgcttccgatgatcggatcaaggttcttgccgccaccaatcgtgttgacgtcctcgatccggctttgctccgttccggtcgtttagatcggaagatcgagttccctcttcccaacgaagaagctcgtgcacagattttgaaaattcactctcgcaagatgacggtggacgacggtgttaattgggcggagttggcacggagcacagacgaatttggcggtgcgcaactgaaggcagtctgcgtggaagccggtatgattgcgttacgaaagggtatgagtaaagtaggccacgagcattatgtggatgccatcgcagaggtccaagcgaagaagaaggataccaatgtcggcatttatgtttga

SEQ ID NO: 5425 - protein, 462 aa, Coccidioides immitis RS
MSTLEELEDLEREDKDKRKEQEERDGQKSDKDGDAEMKDADQKKEEDDLLDEEILRSSTRDIINRRKLLDNDMRIMKSEYQRLMHEQNTMKEKIKDNLDKIENNRQLPYLVGNVVELLDLDVEKEAVEEGANIDLDATRVGKSAVIKTSTRQTIFLPLIGLVDHEKLKPGDLIGVNKDSYLVLDTLPAEYDSRVKAMEVDEKPTEQYTDVGGLNKQIEELVEAIVWPMREAERFKKIGIKAPKGALMYGPPGTGKTLLARACAAQTDATFLKLAGPQLVQMFIGDGAKLVRDCFALAKEKAPAIIFIDELDAVGTKRFDSEKSGDREVQRTMLELLNQLDGFASDDRIKVLAATNRVDVLDPALLRSGRLDRKIEFPLPNEEARAQILKIHSRKMTVDDGVNWAELARSTDEFGGAQLKAVCVEAGMIALRKGMSKVGHEHYVDAIAEVQAKKKDTNVGIYV

SEQ ID NO: 5426 - DNA, 1269 bp, Coccidioides immitis RS
  CDS (1)..(1269)
atgggcgacgccatcgtcgaaacaccggtcaatgttcttgctcctccgctcaaagctaccccagcggaagcgattcccgatattgagcccctggaaggctggggaacagacgacgctgatgaatacaccacgctaaagagattacagcgacatttggagtacataaatctacaggaggagtacatcaaggatgagcaaaggagtcttaagcgagagctcgtcagagcgcaggaggagatcaagagaatacaaagcgttcctttggtgatcggacagttcatggaagccatcgatcagaataccggtatcgtacagtcttcaacagggtctaattatgtcgttcgaattctctcaaccctcgaccgcgagaagctaaaaccgtcgtcctccgtcgccttacaccgtcattctaatgcccttgttgacatccttccgccagaagccgactcctctattgccatgctgggcgcacatgagaagccggatgttacgtacgcggatgttggagggttggatatgcaaaagcaggaaattagagaggccgttgaactgcctttaacgcatttcgatttgtacaaacaaatcggaatcgacccacctcgaggtgtgcttctctatggtcctcctggaacgggcaaaaccatgttggtaaaggctgttgcgaatagcacaactgccaattttatccgcgtcgtcggatcagagtttgtgcagaaatatcttggtgaaggacctcgtatggttcgagacgttttccgcatggcgcgagagaactcacccgctatcatttttattgacgaaattgacgccatcgccactaaacgtttcgacgcccaaaccggagccgatcgtgaagtccagcgtattttgcttgagcttctcaaccagatggacggcttcgaccagaccagcaacgtcaaggtgatcatggccacaaatcgagcagacaccttggaccctgctttacttcgaccaggtcgtttagacaggaaaattgagtttccttccctccgcgatcggcgcgagcgtcgtctaattttcaccacgattgcttcgaagatgtcgctatcgccagaagtagatttggattcgctgattgtccgcaacgatcccttatcgggcgctgtgatcgccgctatcatgcaagaggctggcttgcgtgctgtccggaagaatcgatacaacatcatccaatccgatcttgaggacgcctactcaagccaggtcaagagcggacaggatgcagacaaatttgatttctatcgctga

SEQ ID NO: 5427 - protein, 422 aa, Coccidioides immitis RS
MGDAIVETPVNVLAPPLKATPAEAIPDIEPLEGWGTDDADEYTTLKRLQRHLEYINLQEEYIKDEQRSLKRELVRAQEEIKRIQSVPLVIGQFMEAIDQNTGIVQSSTGSNYVVRILSTLDREKLKPSSSVALHRHSNALVDILPPEADSSIAMLGAHEKPDVTYADVGGLDMQKQEIREAVELPLTHFDLYKQIGIDPPRGVLLYGPPGTGKTMLVKAVANSTTANFIRVVGSEFVQKYLGEGPRMVRDVFRMARENSPAIIFIDEIDAIATKRFDAQTGADREVQRILLELLNQMDGFDQTSNVKVIMATNRADTLDPALLRPGRLDRKIEFPSLRDRRERRLIFTTIASKMSLSPEVDLDSLIVRNDPLSGAVIAAIMQEAGLRAVRKNRYNIIQSDLEDAYSSQVKSGQDADKFDFYR

SEQ ID NO: 5428 - DNA, 1182 bp, Neosartorya fischeri NRRL 181
  CDS (1)..(1182)
atgaacggcggaagcgaccctgagagagagcaggcgctcgaagattacaagaagagcttactagagcttcgagaatgggaagctaagctcaagaatctgcgtatgggcatcaaggacctgcagcgagagtttgatatctccgaagagaacatcaaggccttgcagagtgtcggtcagatcattggcgaagtgctgaaacagctggatgaggagcgattcattgttaaggcgtcatccggtccccgatatgttgtcggctgccgctccaaggtcgataaatcgaaactgaaacagggcactcgtgttgccctcgacatgacaacactcaccatcatgcgcatgctcccgcgtgaagttgatccgctggtatacaacatgtcgttggaggaccctggtcaaatcaacttcgcgggtatcggtggtctgaacgaccaaatcagagagcttcgagaagtgatcgagttgccattgaagaaccccgaactatttcagagagtcggtatcaagccgcccaaaggtgtattactgtacggtcctcccggtaccggaaagacattgctggcacgagccgtggcgagttcgatggaaaccaattttctgaaggtggtttcgtccgcgatcgtcgacaagtacattggtgaatccgcgcggttaataagagagatgttcggttatgcaaaggaacacgagccctgtattatcttcatggacgaaatcgatgctatcggtggcaggcgtttctctgagggtacctcggccgacagagaaatccagagaacattgatggagcttctgaatcagctggatggtttcgactacctcggaaagacgaagatcatcatggcaaccaaccgaccagatacccttgaccctgctttgctccgtgctggtcgtctggaccggaagatcgaaatcccccttcccaacgaggttggccgtctggaaatcctgaagatccactccagcaccgtccagctggagggcgagattgattttgaaagcgttgtaaagatgagcgacggcctcaatggtgccgatctgcgtaacgtggttacggaagctggacttttcgccatcaaggattatcgggacgcgatcagccaggacgacttcaacaaggcggttcgcaaggtcgctgaggccaagaagctggaaggcaagcttgaataccagaaactgtag

SEQ ID NO: 5429 - protein, 393 aa, Neosartorya fischeri NRRL 181
MNGGSDPEREQALEDYKKSLLELREWEAKLKNLRMGIKDLQREFDISEENIKALQSVGQIIGEVLKQLDEERFIVKASSGPRYVVGCRSKVDKSKLKQGTRVALDMTTLTIMRMLPREVDPLVYNMSLEDPGQINFAGIGGLNDQIRELREVIELPLKNPELFQRVGIKPPKGVLLYGPPGTGKTLLARAVASSMETNFLKVVSSAIVDKYIGESARLIREMFGYAKEHEPCIIFMDEIDAIGGRRFSEGTSADREIQRTLMELLNQLDGFDYLGKTKIIMATNRPDTLDPALLRAGRLDRKIEIPLPNEVGRLEILKIHSSTVQLEGEIDFESVVKMSDGLNGADLRNVVTEAGLFAIKDYRDAISQDDFNKAVRKVAEAKKLEGKLEYQKL

SEQ ID NO: 5430 - DNA, 1572 bp, Neosartorya fischeri NRRL 181
  CDS (1)..(1572)
atgctggtcgccaagaccggaccagatggcgacaacagcttacctgagagctctccgtccgtctgtccagcggaagcttcactcactcaatacgttcacgccttcatccaccctctaacatcaaccacccctttcaacgactctgctggtatcaaggttgctgtcgtcaggagactaattctgggtaaccagcagtcaaacatcggtggaggccctggcggggatgggagagatgacaaggataagaagaaggagaagcccaagtacgaaccaccaccaccacctaccaccagggttgggcggaagaagcgcaaggctgccggccctagcactgcctcaaaacttcccgacatttttcctacgtcacgatgtaaattacgataccttcgaatgcaacgagtccatgaccacctgttgctcgaagaggagtatgtggagaatatggagcgtctgcgcaaggccaaagctcaggcaacgctggactctgtgagccgaggtgacctggatatcatggacaggaatgcggacgaaaggagccgcgtggatgacatgagaggcagccccatgggagtcggtaacctggaggagctgattgacgatgaccatgcgattgtctcgagtgctaccggccccgagtactacgtttctatcatgtcctttgtcgacaaggatctgctggagcctggtgccagcatccttctgcatcacaagtctgtatctgtcgtcggtgtgctgacggaagagtccgatcctctggtctcagtcatgaaactcgacaaggcaccaaccgagtcgtacgcagatattggtggtctcgagtcgcagattcaagaagtccgagagtctgtcgagttgcccttgctccacccggaactgtatgaggagatgggtatcaagccgccaaagggtgtcattctctacggtgctcctggtaccggtaaaaccttgcttgccaaggctgttgcaaaccagaccagcgccactttccttcgaattgtcggaagtgagctgatccagaaatacctgggagatggtcctcggttggtgcgacagattttccaggttgctgccgagcatgcgccctcgattgtcttcatcgatgaaattgatgccatcggtaccaagcgttacgactctacatctggcggtgaacgagaaatccagcgtactatgttggagcttcttaaccaactggatggtttcgacgaccgtggtgatgtaaaggttattatggccacaaacaagattgagactctggatcctgccttgatccgtccgggccgtattgaccgaaagattctcttcgaaaacccagaccaaaataccaagaagaagatcttcacactgcacacgtccaagatgtctctcggagatgacgttgacctcgatgaattcatcaaccagaaagacgatctctctggtgctgatatccgagctatttgcacagaggccggtctgatggcgctgagagagcgccgtatgagggtgcaaatggatgatttccgtgccgctagggaacggatcatgaagactaagcaggatggcggtcctgtggagggcttgtatttgtaa

SEQ ID NO: 5431 - protein, 523 aa, Neosartorya fischeri NRRL 181
MLVAKTGPDGDNSLPESSPSVCPAEASLTQYVHAFIHPLTSTTPFNDSAGIKVAVVRRLILGNQQSNIGGGPGGDGRDDKDKKKEKPKYEPPPPPTTRVGRKKRKAAGPSTASKLPDIFPTSRCKLRYLRMQRVHDHLLLEEEYVENMERLRKAKAQATLDSVSRGDLDIMDRNADERSRVDDMRGSPMGVGNLEELIDDDHAIVSSATGPEYYVSIMSFVDKDLLEPGASILLHHKSVSVVGVLTEESDPLVSVMKLDKAPTESYADIGGLESQIQEVRESVELPLLHPELYEEMGIKPPKGVILYGAPGTGKTLLAKAVANQTSATFLRIVGSELIQKYLGDGPRLVRQIFQVAAEHAPSIVFIDEIDAIGTKRYDSTSGGEREIQRTMLELLNQLDGFDDRGDVKVIMATNKIETLDPALIRPGRIDRKILFENPDQNTKKKIFTLHTSKMSLGDDVDLDEFINQKDDLSGADIRAICTEAGLMALRERRMRVQMDDFRAARERIMKTKQDGGPVEGLYL

SEQ ID NO: 5432 - DNA, 1266 bp, Neosartorya fischeri NRRL 181
  CDS (1)..(1266)
atgggagacgtcgccgtggagagctcggcgaccaacgtcacgcctagcaagtcggcgccattcgataccatccctaatatagactctctcgaaggcacagatgcagatggaggtgatgagtatgcaactttgaaaagacttcagagacacttagaatacatccagcttcaagaagagtacattaaggatgaacaaaggagtttgaagcgagagctcgtccgtgcacaggaggagatcaaacggatacagagcgtgcctctcgttatcggacaatttatggaagctatcgatcagaacactggtatcgtacagtcgtcaactggctcgaattatgtcgtgcgcatcctttctacactcgatcgcgagaagctcaagccatcgtcctcggtcgccctgcaccgccattccaatgcccttgtcgatattctacctccggaggcagattcgtccattgccatgctcggcgagaacgaaaagccagatgtcacttacgccgacgtcggtggattggacatgcagaagcaggagattagggaggctgtcgagctacccttgacgcatttcgacctttacaaacagattggtattgatccgcctcgtggtgttctactttacggccctcccggtactggtaagacgatgttggtcaaagctgtggcaaacagcacaactgccagcttcattcgtgtgaacggttcggagtttgtccagaaatacttgggagaaggtcctcgcatggttcgcgacgtgttcagaatggctcgtgagaactcacccgccattatcttcattgacgaaatcgatgcaattgctaccaaacgattcgatgcccagactggtgccgatcgtgaagttcagcgtatcctgcttgagctcctcaatcagatggacggcttcgagcagacaagcaatgtgaaggtcatcatggccaccaaccgagcggatactctggacccagccctcttacgtccaggtcgtttggatcgtaagattgagtttccgtcgctgcgtgaccgacgggagcgtcgactgattttcaccactatcgcatcgaagatgtctttgtccccagaggtcgatctggattcactcatcgtacgaaacgagccactctctggtgctgttattgccgccatcatgcaggaagctggactacgtgctgttcgcaagaaccgctacaatatcatccagtctgaccttgaggacgcctatgctgctcaggtcaagaccggccaggaagcggacaggctcgaattctaccggtag

SEQ ID NO: 5433 - protein, 421 aa, Neosartorya fischeri NRRL 181
MGDVAVESSATNVTPSKSAPFDTIPNIDSLEGTDADGGDEYATLKRLQRHLEYIQLQEEYIKDEQRSLKRELVRAQEEIKRIQSVPLVIGQFMEAIDQNTGIVQSSTGSNYVVRILSTLDREKLKPSSSVALHRHSNALVDILPPEADSSIAMLGENEKPDVTYADVGGLDMQKQEIREAVELPLTHFDLYKQIGIDPPRGVLLYGPPGTGKTMLVKAVANSTTASFIRVNGSEFVQKYLGEGPRMVRDVFRMARENSPAIIFIDEIDAIATKRFDAQTGADREVQRILLELLNQMDGFEQTSNVKVIMATNRADTLDPALLRPGRLDRKIEFPSLRDRRERRLIFTTIASKMSLSPEVDLDSLIVRNEPLSGAVIAAIMQEAGLRAVRKNRYNIIQSDLEDAYAAQVKTGQEADRLEFYR

SEQ ID NO: 5434 - DNA, 1395 bp, Neosartorya fischeri NRRL 181
  CDS (1)..(1395)
atgtcgacccttgaagatctggaggatctcgaacgcgaggagagagacaagaagaaggaccagggcgatggtgacggccagcagcctggaggagatggagatgctgaaatgaaagatgcagatgcgaagaagaaggatgaagaagatgatttactggatgaggagattctcaactcgagcacagcagacattgtcaagcggcgacggatgttggagaatgagctccgcataatgaagagcgaataccaacgattgacacatgaacagaatactatgcgggagaaggtgagggataaccaggagaaaattgagaacaacaggcaacttccatacctcgtcggaaatgtcgtcgagcttttggatctagatgttgaggcagaggccgctgaagaaggagcgaacatcgatcttgacgctacccgagtgggcaaatccgctgtcatcaaaacatcgactagacagactatctaccttcctctcatcggtctggtagaccacgagaaactgaagcccggtgatctgatcggtgtcaacaaggattcatacctgattttggatacactacccgccgagtatgataatcgtgtgaaggccatggaggtcgacgagaagccgacagagaagtacacggacattggtggtttggacaagcagattgaagagatcgtggaagccatcgtatggccgatgaaggaggcagaacgatttacgaagattggtatcaaggcaccaaagggtgctctgatgtacggtcctcctggtaccggtaaaacccttcttgcgcgagcctgcgccgcagagacaaacgctacgttcctgaagcttgctggacctcagctggtgcagatgttcatcggtgacggtgccaagctggtccgggactgcttcgctcttgccaaggagaaggctccttcgatcattttcattgacgaactcgacgccgtgggtaccaagcgtttcgactccgagaagtccggtgaccgtgaggtgcaacggaccatgttggagcttctgaaccagcttgatggatttgcttcggatgatcgtatcaaggtcctggccgcgacaaaccgtatcgatgtccttgatcccgctctcctccgttccggtcgactggaccgcaagatcgaattccctctacccaacgaggaggcacgggcaaacatcctgcagatccactcccgcaagatgactgtggacgacggcgtcaactgggccgaattggctcgaagtaccgatgagttcggtggtgcgcagctgaaggccgtctgtgtggaagccggtatgattgctctccggaaaggcatgagcaagatcggacacgagaactacgtggatgctatcgctgaggtgcaggccaagaagaaggacacaaacatgggtatctatgtctag

SEQ ID NO: 5435 - protein, 464 aa, Neosartorya fischeri NRRL 181
MSTLEDLEDLEREERDKKKDQGDGDGQQPGGDGDAEMKDADAKKKDEEDDLLDEEILNSSTADIVKRRRMLENELRIMKSEYQRLTHEQNTMREKVRDNQEKIENNRQLPYLVGNVVELLDLDVEAEAAEEGANIDLDATRVGKSAVIKTSTRQTIYLPLIGLVDHEKLKPGDLIGVNKDSYLILDTLPAEYDNRVKAMEVDEKPTEKYTDIGGLDKQIEEIVEAIVWPMKEAERFTKIGIKAPKGALMYGPPGTGKTLLARACAAETNATFLKLAGPQLVQMFIGDGAKLVRDCFALAKEKAPSIIFIDELDAVGTKRFDSEKSGDREVQRTMLELLNQLDGFASDDRIKVLAATNRIDVLDPALLRSGRLDRKIEFPLPNEEARANILQIHSRKMTVDDGVNWAELARSTDEFGGAQLKAVCVEAGMIALRKGMSKIGHENYVDAIAEVQAKKKDTNMGIYV

SEQ ID NO: 5436 - DNA, 1401 bp, Aspergillus clavatus NRRL 1
  CDS (1)..(1401)
atgtcgaccctcgaagatctggaagaccttgagcgcgaggagagagacaagaagaaggagcagggcgatggtaacggtgacggccagaagcccggaggcgatggcgatgccgaaatgcaagacgccgactcgaaaaagaaagaggaggaagatgagcttctggacgatgagattttgaattcgagcacagcagacatcgtcaagcggcggcggatgctggagaacgagctccgcataatgaagagtgaatatcagcggttgacgcacgagcagagcacaatgcgggaaaaggttaaggataaccaggaaaagatcgagaacaacagacaattaccgtaccttgtcggaaacgttgttgaactgttggacctggatgtcgaggcagaggccgctgaagaaggggccaacatcgatctcgatgctacccgcgtgggcaaatccgctgtcatcaagacatcgacccgtcagaccatttatctcccacttattggtcttgtagatcacgagaagctcaagcccggtgacctgattggtgtgaacaaggattcatatctcgttttggatacgctacccgccgagtatgacaaccgagtgaaggccatggaggtcgatgagaagccaacagagaagtacacggatattggtggtctggacaagcagattgaagaaatcgtggaagctattgtatggccaatgaaggaggcggagagattcaagaagatcggtatcaaggcaccaaagggtgctttgatgtacggtcctcctggtaccggtaaaaccctcctcgcccgagcctgtgccgcagagacaaacgccacattcctgaagcttgcgggtccccaactggtacagatgttcatcggtgatggtgccaagctggttcgtgactgcttcgctcttgcaaaggagaaggccccatcgatcatcttcatcgacgaactggatgccgtgggtaccaagcgtttcgactcggagaagtccggtgatcgtgaagtgcagcggacgatgttggaacttctaaaccagcttgacggcttcgcctcggacgaccgtatcaaggtcctggccgctacgaaccgtatcgacgtcctcgatcccgcccttctccgttccggtcgtttggaccgcaagatcgagttccccctgcccaacgaggaggcccgcgcaaacatcctgcagattcactcccgcaagatggccgtggacgacactgtcaactgggctgaactggcccgaagtaccgatgaattcggtggtgcacagctcaaggctgtctgtgtggaggcgggtatgatcgcgctccgtaagggcatgaacaaggtcgggcatgagaactacgtcgatgcgattgccgaagtccaggccaagaagaaggatacgaatatgggtatctatgtctaa

SEQ ID NO: 5437 - protein, 466 aa, Aspergillus clavatus NRRL 1
MSTLEDLEDLEREERDKKKEQGDGNGDGQKPGGDGDAEMQDADSKKKEEEDELLDDEILNSSTADIVKRRRMLENELRIMKSEYQRLTHEQSTMREKVKDNQEKIENNRQLPYLVGNVVELLDLDVEAEAAEEGANIDLDATRVGKSAVIKTSTRQTIYLPLIGLVDHEKLKPGDLIGVNKDSYLVLDTLPAEYDNRVKAMEVDEKPTEKYTDIGGLDKQIEEIVEAIVWPMKEAERFKKIGIKAPKGALMYGPPGTGKTLLARACAAETNATFLKLAGPQLVQMFIGDGAKLVRDCFALAKEKAPSIIFIDELDAVGTKRFDSEKSGDREVQRTMLELLNQLDGFASDDRIKVLAATNRIDVLDPALLRSGRLDRKIEFPLPNEEARANILQIHSRKMAVDDTVNWAELARSTDEFGGAQLKAVCVEAGMIALRKGMNKVGHENYVDAIAEVQAKKKDTNMGIYV

SEQ ID NO: 5438 - DNA, 1266 bp, Aspergillus clavatus NRRL 1
  CDS (1)..(1266)
atggccgacgtagccgtggagacttcggcgaacaacgtcacgcctatcaagccagctccattcgacaccattcccaacatcgactccctcgaaggcacagacgctgatggaggcgacgagtatgctactttgaaaaggcttcaaaggcatctagagtatatccagctgcaagaggaatacatcaaagatgagcaaaggagcttgaaacgagagctcgttcgtgcgcaagaagagatcaagcggatacagagtgtgcccctggtgatcggacaatttatggaagctattgatcaaaatacgggtattgtgcagtcgtcaaccggctcgaactatgtcgtccgtatcctttccacactcgatcgcgagaagctcaagccatcatcctcggtcgccctgcaccgtcattccaacgcccttgtcgatattctgcccccggaagcagattcctccatcgctatgctcggtgaaagcgagaagccagatgttacatacgccgacgtgggtggcttggacatgcagaaacaagagatcagggaggccgtcgagctaccgcttacgcactttgacctttacaaacagattggtatcgatcctcctcgtggtgtcctgctgtacggccccccgggtactggcaagacgatgttggtcaaggcggtcgcaaacagcacaactgccagctttattcgtgtgaacggctccgagttcgtccagaaatacctcggagaaggtccacgcatggtccgtgatgtgttcagaatggcccgtgagaactcccctgctatcatcttcattgatgaaatcgatgccattgctaccaagcgtttcgatgcccaaaccggtgccgatcgtgaagtgcagcgtatcctgctcgaacttctgaatcagatggatggcttcgagcagacgagcaatgtaaaggtgatcatggccaccaaccgagcggacacactggatccagcccttctccgtccaggtcgtctagatcgcaagattgagttcccgtcgctgcgtgaccgacgggagcgtcgactgatctttactaccatcgcgtccaagatgtccttgtccccagaagtcgatctggactcactcattgtacgaaatgagcccctgtccggtgcggttattgccgccatcatgcaggaggccggattacgggcggttcgcaagaatcgctacaatatcattcagtctgaccttgaagatgcctatgctgcccaggtcaagactgggcaggaagcggaccggctcgaattctaccggtag

SEQ ID NO: 5439 - protein, 421 aa, Aspergillus clavatus NRRL 1
MADVAVETSANNVTPIKPAPFDTIPNIDSLEGTDADGGDEYATLKRLQRHLEYIQLQEEYIKDEQRSLKRELVRAQEEIKRIQSVPLVIGQFMEAIDQNTGIVQSSTGSNYVVRILSTLDREKLKPSSSVALHRHSNALVDILPPEADSSIAMLGESEKPDVTYADVGGLDMQKQEIREAVELPLTHFDLYKQIGIDPPRGVLLYGPPGTGKTMLVKAVANSTTASFIRVNGSEFVQKYLGEGPRMVRDVFRMARENSPAIIFIDEIDAIATKRFDAQTGADREVQRILLELLNQMDGFEQTSNVKVIMATNRADTLDPALLRPGRLDRKIEFPSLRDRRERRLIFTTIASKMSLSPEVDLDSLIVRNEPLSGAVIAAIMQEAGLRAVRKNRYNIIQSDLEDAYAAQVKTGQEADRLEFYR

SEQ ID NO: 5440 - DNA, 1410 bp, Aspergillus clavatus NRRL 1
  CDS (1)..(1410)
atgtcacactctggggccatgggtaaccagcagtcgaacatcggaggaggtcccggcggggatggaagagatgacaaggacaagaagaaggagaagcctagatacgaaccaccaccaccacctacaacccgcgttggacggaagaagcgcaaggcggccggtcctagcactgcatcgaaattgccggacatcttccctacgtcacgatgtaaactacgataccttcgaatgcaacgggtccacgaccacctattgctcgaggaggaatatgtggagaacatggagcgtctgcgcaaggccaaggcccaggcttcgctggactccgtgagcccgggtgacttggatatcatggacagaaacgcagatgagaggagtcgggttgatgacatgagaggcactcctatgggagtcggcaatctggaagagttgattgacgatgaccatgcgattgtttcgagtgcaaccggccccgagtactacgtctctatcatgtcctttgtcgacaaggatctgctggagcccggtgccagtatccttttgcatcacaagtcggtttcggtcgttggtgtgctgactgaggagtcggacccgcttgtctccgtcatgaagctcgacaaagcaccgactgagtcttatgccgatattggtggtctcgagtcgcagatccaagaagttcgagaatcggtcgagctgccgttgctgcatccagagttgtacgaagagatgggtatcaagccgccaaagggtgtcattctctacggtgctcctggtaccggcaagacgttgcttgctaaggccgttgccaaccaaaccagtgccactttcctccgtattgtcggtagtgagctgatccagaagtacctcggtgatggtccgcggttggttcgccagattttccaggttgccgccgaacatgctccctccatcgtgttcatcgatgaaatcgacgccatcggtacgaagcgttatgattctacatccggtggtgagcgagaaatccagcgtaccatgttggagcttctgaaccagctggatggattcgatgatcgtggagacgtgaaggtcattatggccacaaataagattgagacgctggatcctgccctgatccgtcctggacgtattgaccggaagattctcttcgagaacccagatcaaaacaccaagaagaagatcttcactttgcacacgtccaagatgtcgcttggagatgacgtggacctcgacgaatttatcaaccagaaggatgatttgtccggtgccgatatcagagccatttgcacagaggctggtctcatggcgctgagagagcgtcgcatgagagtgcagatggacgatttccgcgctgccagggagcggatcatgaagaccaagcaggacggcggacctgtggagggcttgtacttgtag

SEQ ID NO: 5441 - protein, 469 aa, Aspergillus clavatus NRRL 1
MSHSGAMGNQQSNIGGGPGGDGRDDKDKKKEKPRYEPPPPPTTRVGRKKRKAAGPSTASKLPDIFPTSRCKLRYLRMQRVHDHLLLEEEYVENMERLRKAKAQASLDSVSPGDLDIMDRNADERSRVDDMRGTPMGVGNLEELIDDDHAIVSSATGPEYYVSIMSFVDKDLLEPGASILLHHKSVSVVGVLTEESDPLVSVMKLDKAPTESYADIGGLESQIQEVRESVELPLLHPELYEEMGIKPPKGVILYGAPGTGKTLLAKAVANQTSATFLRIVGSELIQKYLGDGPRLVRQIFQVAAEHAPSIVFIDEIDAIGTKRYDSTSGGEREIQRTMLELLNQLDGFDDRGDVKVIMATNKIETLDPALIRPGRIDRKILFENPDQNTKKKIFTLHTSKMSLGDDVDLDEFINQKDDLSGADIRAICTEAGLMALRERRMRVQMDDFRAARERIMKTKQDGGPVEGLYL

SEQ ID NO: 5442 - DNA, 1242 bp, Drosophila pseudoobscura pseudoobscura
  CDS (1)..(1242)
atgccatacaacatggacatactcatgcctgagaaggacgaactctgcgattcaaagccgaaagatgcgcacagctctttggatgaattggacattgatgatttgtatgtgcgttataagaaacttcaaaaaaccttggagttcatagaggtgcaagaggagtacatcaaggatgaacaacgtaatcttaagaaggaatatctacatgcccaggaggaggtgaagcgcatacagtcggtgccgcttgtgattggacaattcctggaagctgtcgaccagaacacgggaattgtcggctccacaacaggctccaattactatgtccgcatactgtccaccatcgaccgtgagttgctaaaaccatcggcatccgtggctctgcacaagcacagcaatgccttggtggatgtgctgccacccgaggcggacagttctatatcaatgctgcagcccgacgagaaaccagacgtcagctatgccgacattggcggcatggatatgcagaagcaggagattcgcgaggcagtcgagctacctctaacccacttcgaactctacaaacagatcggcattgatcccccccgcggtgtcctcatgtacgggccgcctggttgcggcaagactatgctggccaaggctgtggctcaccacacaaccgcctcctttatccgagtggtcggatctgagttcgtgcagaaatacctcggcgagggtcctcgcatggtgcgcgatgtcttccgtctggccaaggagaacgctccagccattatattcattgacgagatcgacgcgattgcaaccaaacgtttcgatgcccagaccggtgccgatcgcgaggtccagcgaattttgcttgagctgctcaaccagatggatggcttcgaccagaccaccaatgtaaaagtgatcatggccaccaatcgcgccgacaccctggatccagctctgctgcgacctggtcgtcttgatcgcaagatcgaatttccgctgcctgatcgccgccagaagcgtttggtcttctccacgatcacgtccaaaatgaacctcagcgaggatgtcgatctggaggagttcgtggcgcgtccggacaagatatccggcgccgacataaatgccatctgccaggaggcgggcatgcacgcggtgcgtgaaaatcgttacatcgttctcgccaaagacttcgagaagggctacaagaacaacatcaagaaggacgaacaggagcacgagttctacaaatag

SEQ ID NO: 5443 - protein, 413 aa, Drosophila pseudoobscura pseudoobscura
MPYNMDILMPEKDELCDSKPKDAHSSLDELDIDDLYVRYKKLQKTLEFIEVQEEYIKDEQRNLKKEYLHAQEEVKRIQSVPLVIGQFLEAVDQNTGIVGSTTGSNYYVRILSTIDRELLKPSASVALHKHSNALVDVLPPEADSSISMLQPDEKPDVSYADIGGMDMQKQEIREAVELPLTHFELYKQIGIDPPRGVLMYGPPGCGKTMLAKAVAHHTTASFIRVVGSEFVQKYLGEGPRMVRDVFRLAKENAPAIIFIDEIDAIATKRFDAQTGADREVQRILLELLNQMDGFDQTTNVKVIMATNRADTLDPALLRPGRLDRKIEFPLPDRRQKRLVFSTITSKMNLSEDVDLEEFVARPDKISGADINAICQEAGMHAVRENRYIVLAKDFEKGYKNNIKKDEQEHEFYK

SEQ ID NO: 5444 - DNA, 1161 bp, Drosophila pseudoobscura pseudoobscura
  CDS (1)..(1161)
atgaaagacctcgcattgtttcacaacaagaatttgcaaaattacgcaggtttagaaatcaaggatctatatgtgatatacaagaaactgcagatggagttggagcttatccaggaattcatacacgcccaggaggaggtgaagcgtataaaagcagtacccttggttattggccagtttctagagccagttgattcaaacaatggcatcgtagcttctaccactggctcaaactactatgtccgtgttctgtctaccattgatagagagcaactgaagccgtcggcatcggtggccctgcacaagcagagcaactgtttggtggatttggtaccgccagaggctgacagcaccatctctatgctatcggcggatgagaagcccgatgtgagctactcggacattggtggtctcgacatgcagaagcaagagattcgcgaggcggttgagctgccactcacgcatgctcatctttataagcaaattggcattgaccctcctcgtggcgtcctactttacggcccgccgggatgcggcaagactatgctggccaaggctgtggcacaccacacaaccgccaactttataagtgttgtgggctcggagtttgttcagaagtacttgggcgaggggccacgtatggtgcgcgaccttttccgcctggcaaagcagaattgtccgtcggtcatctttattgatgaaatcgatgccatcgccaccaagcgctttgacgcacaaacgggcgcagatcgcgaagttcagcgcatactgctagagcttctcaaccaaatggacggcttcgatgaaacaaccaacgttaaggtgattatggccactaaccgggctgacactctagatccagctctgctccgtccggggcgcatggaccgtaagatagagtttcccttgccagatcgtcgtcagaagcgtttggtcttcacgaccataacctccaaaatgaatctgggggaggacgttgacttggaggacataatagcacgtcccgacaagatatccaacgcagacattaatgccatatgccaggaggccggcatgcatgccgttcgtgagaatcgttatgtcgtcaatgcaaaggatttggaaaaaggctacaaagcaagcgtgcgcaaggatgaggcccagcacgagttctacaattaa

SEQ ID NO: 5445 - protein, 386 aa, Drosophila pseudoobscura pseudoobscura
MKDLALFHNKNLQNYAGLEIKDLYVIYKKLQMELELIQEFIHAQEEVKRIKAVPLVIGQFLEPVDSNNGIVASTTGSNYYVRVLSTIDREQLKPSASVALHKQSNCLVDLVPPEADSTISMLSADEKPDVSYSDIGGLDMQKQEIREAVELPLTHAHLYKQIGIDPPRGVLLYGPPGCGKTMLAKAVAHHTTANFISVVGSEFVQKYLGEGPRMVRDLFRLAKQNCPSVIFIDEIDAIATKRFDAQTGADREVQRILLELLNQMDGFDETTNVKVIMATNRADTLDPALLRPGRMDRKIEFPLPDRRQKRLVFTTITSKMNLGEDVDLEDIIARPDKISNADINAICQEAGMHAVRENRYVVNAKDLEKGYKASVRKDEAQHEFYN

SEQ ID NO: 5446 - DNA, 1320 bp, Drosophila pseudoobscura pseudoobscura
  CDS (1)..(1320)
atgggacaaaaccaatcggcccaagggggctctggcgacaagaaggatgataaagacaaaaagaagaagtacgagccaccaattccgactcgcgtcggcaagaagaagcgccgcgcaaagggacccgatgcggccatgaagctgcccctggtgacgccccatacgcgttgccggctcaagctgctcaaactggagcgcatcaaagattacctgatgatggaggatgagtttattcgcaaccaggagcgtttgaagccccaagacgagaagaacgaggaggagcgctccaaggtggatgacctgcgcggcacaccaatgtctgtgggtaatctggaggagattatcgatgataatcacgcgattgtgtccacctctgtgggctccgagcactacgttagcattttatcctttgtggacaaggatcagctggagcctggatgctcggtcctgctgaatcacaaagttcacgccgttgtgggtgttctcagtgacgacaccgatcctatggtcactgtaatgaagctggagaaggcaccacaggaaacctatgcagacattggtggcctggacactcagattcaggaaatcaaagagtctgtcgagctgccgctaacgcatcccgaatactacgaggaaatgggcatcaagcctccaaagggtgtcatcctctatggcccaccaggcacaggcaagactctccttgccaaggccgtggccaatcaaacctcggccacgttccttcgcgttgtgggctcggaacttatacaaaagtatctgggcgatggccccaagctggtgcgggaactgttccgtgtggccgaggagcatgcaccgtctatagtgtttatcgacgaaatcgatgctgtaggcacgaagcgttacgactcgaactctggcggcgagcgtgagatccagagaactatgttggagctgctcaatcagttggatggctttgattcgcgcggcgatgtgaaggtaataatggctacgaatcgcattgagacgctcgacccggcgcttatacgtccgggacgtatcgatcgtaagatcgaatttccactgcccgacgagaagacaaagcgacgcattttcaccatccacacgtctcgcatgaccctggccgaagatgtgaacctcagcgaactgatcatggccaaggatgatctctctggcgccgacatcaaggctatttgcacggaagctggtctcatggcactgcgcgagcgccgcatgaaggtgaccaacgaggatttcaagaaatcaaaggagagcgtcttgtaccgaaagaaggagggcacacccgagggattgtatttataa

SEQ ID NO: 5447 - protein, 439 aa, Drosophila pseudoobscura pseudoobscura
MGQNQSAQGGSGDKKDDKDKKKKYEPPIPTRVGKKKRRAKGPDAAMKLPLVTPHTRCRLKLLKLERIKDYLMMEDEFIRNQERLKPQDEKNEEERSKVDDLRGTPMSVGNLEEIIDDNHAIVSTSVGSEHYVSILSFVDKDQLEPGCSVLLNHKVHAVVGVLSDDTDPMVTVMKLEKAPQETYADIGGLDTQIQEIKESVELPLTHPEYYEEMGIKPPKGVILYGPPGTGKTLLAKAVANQTSATFLRVVGSELIQKYLGDGPKLVRELFRVAEEHAPSIVFIDEIDAVGTKRYDSNSGGEREIQRTMLELLNQLDGFDSRGDVKVIMATNRIETLDPALIRPGRIDRKIEFPLPDEKTKRRIFTIHTSRMTLAEDVNLSELIMAKDDLSGADIKAICTEAGLMALRERRMKVTNEDFKKSKESVLYRKKEGTPEGLYL

SEQ ID NO: 5448 - DNA, 1305 bp, Pichia stipitis CBS 6054
  CDS (1)..(1305): transl_table=12
atgcctggaggcgatggcttcaacaaaaagaaagacgacaagaaaaaagaaaagcccaagtatgaacctcccgtagaatccaagtttggcaaaaagagaagaaagggacccgacaccgctgtgaaattgccttcagtatatcccaacactagatgcaaattgaagctcttgaagttggaaagaatcaaagaccatttgcttttggaagaagagtttgtgaccaatcaggaagctttccagcctactgaggctaaacaagccgaagaaagggagaaggtagatgaacttcgtggctatccaatgtctattgggactttggaagaaattattgatgatgaccatgccattgtttccagcacagcaggatctgagtactatgtatcgattatgtcgttcgtagacaagggcttgttggagcctggctgctctgtgcttttgcaccacaagactgtatctgttgtgggggtcttgcaagacgatgctgatcctatggtatccgtgatgaagttggacaagagtcccacggagtcgtatgccgatatcggtggtctcgaatcccaaatccaggagatcaaggaggcagtagagttgccgttaacccacccagagttgtatgaagaaatgggtataaaaccgcctaagggtgtcattttgtatggtgctccgggtacgggtaagacgttgttggcgaaggctgtagctaaccagaccagtgcgacgtttttgcgtattgtaggctcagagttgatccagaagtacttgggtgatggtcctagattgtgtagacaaattttccagatcgctggggaacacgctccctccatcgttttcattgatgagatcgatgccattggtacaaagagatacgaatcgacatcaggtggggaacgtgaaatccagagaacaatgttagagttgttgaaccagctagacgggtttgacgatagaggagacatcaaggtcattatggccaccaacaagatcgagtcattggatccagcgttgatcagacctggaagaattgacagaaagatcttgtttgagaatcccgatgctaacacgaagaagaagatcttaaccattcacacgtcgaagatgtccttggctgacgatgtcaacttggacgagttagttacttccaaggacgacttatctggagctgatatcaaggccatttgtacggaagctggtttgttggcgttgagagaaagaagaatgcaagtcaaggctgacgacttcaagtcagccaaagagagagtactcaagaataaggtggaggagaaccttgaggggttgtacttgtga

SEQ ID NO: 5449 - protein, 434 aa, Pichia stipitis CBS 6054
MPGGDGFNKKKDDKKKEKPKYEPPVESKFGKKRRKGPDTAVKLPSVYPNTRCKLKLLKLERIKDHLLLEEEFVTNQEAFQPTEAKQAEEREKVDELRGYPMSIGTLEEIIDDDHAIVSSTAGSEYYVSIMSFVDKGLLEPGCSVLLHHKTVSVVGVLQDDADPMVSVMKLDKSPTESYADIGGLESQIQEIKEAVELPLTHPELYEEMGIKPPKGVILYGAPGTGKTLLAKAVANQTSATFLRIVGSELIQKYLGDGPRLCRQIFQIAGEHAPSIVFIDEIDAIGTKRYESTSGGEREIQRTMLELLNQLDGFDDRGDIKVIMATNKIESLDPALIRPGRIDRKILFENPDANTKKKILTIHTSKMSLADDVNLDELVTSKDDLSGADIKAICTEAGLLALRERRMQVKADDFKSAKERVLKNKVEENLEGLYL

SEQ ID NO: 5450 - DNA, 1233 bp, Pichia stipitis CBS 6054
  CDS (1)..(1233): transl_table=12
atggaagaacccgtcattttcgaatccgctaatttgactgctcccttcagcaaacacaagtcacaaatagaagacagctctgactcctacttgaagttaaagaagttagaaaaggagttggacctcttgctcttgcaggaagattacatcaaagatgaacagcgccacttgagaagagagttggtgagagctcaagaggaagtcaagagaatcaagtctgttcctttagtgattggtcagttcttggaacctattgatgagaacacaggcattgtttcttcgactactggctccaactatgtagtgagaatcttgtcgacattggacagagaattgttgaagccatcgtcttctgtagctttgcatcgtcactccaacgcgttagtagatatcttgcctcctgaagctgactcatcaatttccatagttggtgacgaccagaagccagatgtcacctacgccgacgttggtggtttggatatgcagaagcaggaaatcagagaagctgtagagttgcccttgacccagggtgacttgtattcgcaaattggtatcgatccaccaagaggtgtcttgttatacggtcccccaggaacagggaagaccatgttagtcaaagctgtggccaactcgaccacagcatcgtttatccgtatcaacggttcagagttcgtccagaaatacttaggtgaggggcctagaatggtcagagatgtgttccgattggccagagaaaactcgcccgccattattttcatagatgaaatagatgccattgcgacaaagagattcgacgctcagacgggggccgacagagaagttcagagaatcttgttggagttattgaaccagatggatggctttgatcagacgtctacagtaaaggtcatcatggccactaatagagcagacacattggatccagccttgttgagacctggaagattggacagaaaaatcgaattcccttcgttgaaagacagaagagaaagaagactcatcttttccaccattgcctccaagatgtcgttggctccggaagtcgacttggactcgttgatcatcagaaatgatcccttgtccggtgccgtcatcgctgccatcatgcaagaagctggcttgagagccgtaagaaagaacagatacatgatcttgcaaagtgacttggaagaagcttacacttctcaagttaaaactggtagtgaacacgataagttcgacttctacaagtag

SEQ ID NO: 5451 - protein, 410 aa, Pichia stipitis CBS 6054
MEEPVIFESANLTAPFSKHKSQIEDSSDSYLKLKKLEKELDLLLLQEDYIKDEQRHLRRELVRAQEEVKRIKSVPLVIGQFLEPIDENTGIVSSTTGSNYVVRILSTLDRELLKPSSSVALHRHSNALVDILPPEADSSISIVGDDQKPDVTYADVGGLDMQKQEIREAVELPLTQGDLYSQIGIDPPRGVLLYGPPGTGKTMLVKAVANSTTASFIRINGSEFVQKYLGEGPRMVRDVFRLARENSPAIIFIDEIDAIATKRFDAQTGADREVQRILLELLNQMDGFDQTSTVKVIMATNRADTLDPALLRPGRLDRKIEFPSLKDRRERRLIFSTIASKMSLAPEVDLDSLIIRNDPLSGAVIAAIMQEAGLRAVRKNRYMILQSDLEEAYTSQVKTGSEHDKFDFYK

SEQ ID NO: 5452 - DNA, 1209 bp, Pichia stipitis CBS 6054
  CDS (1)..(1209): transl_table=12
atgtctgtcgtatcaatcggcaagccttacgtgcacgaaggtgggattcgtccatactttgaacaacagatacaagacacagagatcaagatacagcaaacgacacagaacttgagacggttggaggcacagagaaacaagttgaataacaaagtaagacagttaaaagacgagttgagattgttgcaagaaccgggctcttatgttggggaagttgtcaaagtgatgggattgaagaaggtattggtgaagattcatcctgagggtaaatacattgtcaatgtaaccaaggatatcgacatcaagaagttgactccatctatcagagtgtgcttgaagtcagactcgtacgacttgcacaagattttacccaacaaagtggatccgttggtttcattgatgatggtggagaaggttcccgactccacttacgatatggtgggtggcttagataagcagatcaaagagatcaaagaggtgattgagttgccagtgaagcatccagagttgtttgagagtttgggaattgcccagcctaaaggtgttattctttacggtcctcctggaaccggtaagacattgttggccagagcggtggctcatcacaccgagtgtaagttcatcagagtttctggttctgagttggtgcaaaagtatattggtgaaggttcgcgtatggttcgtgagttatttgtaatggctagagaacacgccccatctatcatatttatggacgaaatcgattccattggttcgtcacgtgtagaaggctcatctggaggagactccgaggtgcagagaactatgttagaattgttaaaccagttggacgggttcgaaagctccaaagacatcaagatcatcatggctactaacagacttgatatcttggaccctgcattgttgagacctggtagaatcgacaggaagatcgagttcccagcacctacagtagctgccagaaccgacatcttgaagattcattctagatccatgaacttgacgagaggcattgacttgagaaagatagccgagaagatgaacgggtgttcaggtgcagatgtcaagggtgtttgtaccgaagctggtatgtacgcattgagagaaagaagaatccacattacgcaagaagactttgagttggctgttgccaaggtgatgtcgaagaacgacgagggagctgtgtcgttggctaagttattcaagtag

SEQ ID NO: 5453 - protein, 402 aa, Pichia stipitis CBS 6054
MSVVSIGKPYVHEGGIRPYFEQQIQDTEIKIQQTTQNLRRLEAQRNKLNNKVRQLKDELRLLQEPGSYVGEVVKVMGLKKVLVKIHPEGKYIVNVTKDIDIKKLTPSIRVCLKSDSYDLHKILPNKVDPLVSLMMVEKVPDSTYDMVGGLDKQIKEIKEVIELPVKHPELFESLGIAQPKGVILYGPPGTGKTLLARAVAHHTECKFIRVSGSELVQKYIGEGSRMVRELFVMAREHAPSIIFMDEIDSIGSSRVEGSSGGDSEVQRTMLELLNQLDGFESSKDIKIIMATNRLDILDPALLRPGRIDRKIEFPAPTVAARTDILKIHSRSMNLTRGIDLRKIAEKMNGCSGADVKGVCTEAGMYALRERRIHITQEDFELAVAKVMSKNDEGAVSLAKLFK

SEQ ID NO: 5454 - DNA, 1392 bp, Aspergillus niger CBS 513.88
  CDS (1)..(1392)
atgggtaaccagcagtccaacatcggcggaggccccggtggcgatggacgggatgagaaagacaagaagaaggacaagcccagatacgaaccaccaccgccgcctacgactcgtctcggacgtaagaagcgcaaggctgccggcccgagtactgcctccaagcttccggacatcttcccaacgtcacgatgtaaattacgatatctccgaatgcaacgagtccacgaccatttgttgctagaggaagagtacgtggagaacatggagcgcctgcgcaagaccaaggcccaggctgcgctggactcggcgaaccgtaatgatctcgacatcatggatcggaacgccgatgagagaagccgggttgacgacatgagaggcagccccatgggtgtcggaaatctggaagagctgattgacgatgaccacgccatcgtctcgagcgcgactggaccagaatactatgtttctatcatgtcgttcgtcgacaaagacctgctcgagcctggtgctagcattcttctacaccacaagtcggtctcggttgtcggtgtgctcaccgaagaatccgaccccctcgtatcagtgatgaagctcgacaaagctcccacagaatcatatgccgatattggtggtctggaaacccagatccaggaagtccgagagtccgtggagcttcccctgctgcatccggagctgtacgaggagatgggtatcaagccacccaagggtgtgattctctacggtgcccctggtaccggaaagacgctgctggccaaggcggtcgcgaaccaaaccagtgctactttcctccgtatcgtgggtagtgagctgattcagaagtaccttggagatggccctcgtctggtccgtcaaatcttccaggttgcagctgagcacgccccctccattgttttcattgatgaaatcgatgcgattggtacgaagcgttatgattctacgtcaggtggtgaacgagaaatccagcgtactatgcttgagcttcttaaccagctcgatggtttcgatgatcggggtgacgtcaaggtcatcatggccaccaacaagattgagaccttggatcctgctttgattcgtccgggacgtattgaccgaaagattctcttcgagaacccagaccaaaataccaagaagaagatctttaccctgcacacttccaagatgtcgctgggagacgatgtcgacctggacgagttcatcaaccagaaggatgatctctctggtgctgatattcgtgcgatctgtactgaagccggtttgatggcgctgagagagcgccggatgcgggtgcagatggacgacttccgcgcagcaagggagcggatcatgaagacgaagcaggatggaggcccggtggagggactgtacttgtag

SEQ ID NO: 5455 - protein, 463 aa, Aspergillus niger CBS 513.88
MGNQQSNIGGGPGGDGRDEKDKKKDKPRYEPPPPPTTRLGRKKRKAAGPSTASKLPDIFPTSRCKLRYLRMQRVHDHLLLEEEYVENMERLRKTKAQAALDSANRNDLDIMDRNADERSRVDDMRGSPMGVGNLEELIDDDHAIVSSATGPEYYVSIMSFVDKDLLEPGASILLHHKSVSVVGVLTEESDPLVSVMKLDKAPTESYADIGGLETQIQEVRESVELPLLHPELYEEMGIKPPKGVILYGAPGTGKTLLAKAVANQTSATFLRIVGSELIQKYLGDGPRLVRQIFQVAAEHAPSIVFIDEIDAIGTKRYDSTSGGEREIQRTMLELLNQLDGFDDRGDVKVIMATNKIETLDPALIRPGRIDRKILFENPDQNTKKKIFTLHTSKMSLGDDVDLDEFINQKDDLSGADIRAICTEAGLMALRERRMRVQMDDFRAARERIMKTKQDGGPVEGLYL

SEQ ID NO: 5456 - DNA, 1395 bp, Aspergillus niger CBS 513.88
  CDS (1)..(1395)
atgtcgaccttggaagacctcgacgaccttgagcgtgagcagagagacaagaagaaggaccaaggagatgacggtgacggcaggaagcccgaaggtgaaggagatgctgatatgaaagatgccgatgccaagagagatgaggatgatggactcttggacgaggagatccttagctcgagcacagcggacatcgtcaagcgacggcggatgctggagaacgagctgcgtataatgaagagcgaataccagcgcctgactcacgagcaaaacacgatgcgagagaaagtcaaggataaccaagaaaagatcgagaacaacaggcaattaccctacctggtcggaaacgtcgtcgagcttttggatttggatgttgaagctgaggcggctgaggagggggcgaacattgaccttgatgctacacgggtgggcaagtcggctgtcatcaagacgtcgacccgccagactatctatcttcctctcattggtctagtagatcacgagaagctgaagcctggtgatctgatcggtgtcaacaaggactcatacctcgtcctggatacgctacctgccgagtacgataaccgtgtcaaggccatggaggtcgatgagaagccgacggagaagtacaccgacattggtggtttggataagcaaatcgaggaaattgtggaggctatcgtatggcctatgaaggaagctgacaggttcaagaagcttggcattaaggcaccgaaaggtgctctaatgtatgggccgcccggtactggtaaaacacttcttgcccgagcctgtgcagcagagacgaacgccactttcctcaagcttgccggtccgcagttggtgcagatgttcatcggtgatggtgcgaaactcgttcgtgactgcttcgcccttgccaaggagaaggcaccttccatcatcttcatcgacgagctggatgcggtcggtacgaagcggttcgactccgagaagtccggtgaccgtgaagtgcagcgaaccatgcttgaacttctcaaccagctcgacggatttgcctcggacgatcgcatcaaggttctcgcggccacgaatcgtgtcgacgttctcgatcccgccctgctccgttccggtcgtctggaccgcaagatcgagttcccgctacccaacgaggaggcgagagccaacatcctgcagattcactcccgcaaaatggctgtggatgaccgggttaactgggcggaactggcccgcagtaccgacgagtttggtggtgctcagctgaaggccgtgtgcgtggaggcaggtatgattgctctccggaagggcatgagcaaggtaggacacgagaactacgtggatgccatttcggaagtacaggcaaagaagaaggacacgaacatgggtatctatgtctaa

SEQ ID NO: 5457 - protein, 464 aa, Aspergillus niger CBS 513.88
MSTLEDLDDLEREQRDKKKDQGDDGDGRKPEGEGDADMKDADAKRDEDDGLLDEEILSSSTADIVKRRRMLENELRIMKSEYQRLTHEQNTMREKVKDNQEKIENNRQLPYLVGNVVELLDLDVEAEAAEEGANIDLDATRVGKSAVIKTSTRQTIYLPLIGLVDHEKLKPGDLIGVNKDSYLVLDTLPAEYDNRVKAMEVDEKPTEKYTDIGGLDKQIEEIVEAIVWPMKEADRFKKLGIKAPKGALMYGPPGTGKTLLARACAAETNATFLKLAGPQLVQMFIGDGAKLVRDCFALAKEKAPSIIFIDELDAVGTKRFDSEKSGDREVQRTMLELLNQLDGFASDDRIKVLAATNRVDVLDPALLRSGRLDRKIEFPLPNEEARANILQIHSRKMAVDDRVNWAELARSTDEFGGAQLKAVCVEAGMIALRKGMSKVGHENYVDAISEVQAKKKDTNMGIYV

SEQ ID NO: 5458 - DNA, 1464 bp, Aspergillus niger CBS 513.88
  CDS (1)..(1464)
atgggagacgtcgccgtcgagaccccggcgaacaacgtcacgcctctcaccaaggcagctccattggacacgatccccaacatagactcgctcgagggcacaggaaacgatgggagcgatgaatacgccacactgaagagattgcagagacacctagagtacattcagcttcaggaggagtacatcaaggatgagcaaaggcagagcttgaagagagaacttgttcgtgcgcaggaagagatcaagcggatacagagtgtgcctttggttatcggccagttcatggaggcgatcgatcagaataccggtattgtgcagtcgtcgaccggttcgaattatgtcgtccgtatcctgtccacgctcgaccgcgagaagctcaagccttcgtcctcggtcgcactccaccgtcactccaacgcccttgtcgatatcttacctccggaggctgactcctccatcgctatgctgggcgagaatgagaagcctgatgtgacctatgcggatgttggtggtcttgacatgcagaagcaggagatcagggaagcagtcgagctgcccttgacgcaatttgacctttacaagcagatcggtatcgaccctcctcgcggtgttctcctttacggccctcccggtacgggtaagaccatgctggtcaaggcggtggcaaacagcacaaccgccagctttatccgtgtaaacggctcggaattcgttcagaaatacctgggtgaaggacctcgcatggttcgtgatgttttcagaatggcgcgggagaactccccggccatcattttcatcgatgagattgatgccatcgccacgaagcgtttcgacgcccagaccggtgcagaccgtgaggtgcagcgtattctgctggagcttctcaaccagatggatggattcgagcagtcgagcaatgtcaaggttatcatggccaccaacagagccgatactctggatccggccttgctacgtccgggtcgtctggaccggaagatcgagttcccgtctttgcgcgaccggcgtgagcgccggttgattttctctacgatagcatccaagatgtcgctttcgccggaagttgacctggactcgctgattgtgcgcaatgagcccctctcgggtgcggtcattgccgctatcatgcaagaggcgggtctccgtgctgtccggaagaaccgttacaacatcatccagtctgatctcgaggatgcttacgccgcccaggtgaagaccggacaggaagcggataggtacgggacattttctaatctacccgcgatcgggacatggctaaccaagcatatagactcgaattctaccggtaaatcaagtatgggacgtgcatcaggctggatatcggattacgcaaggcgaacagggggaccgttagctgtattatcaacatctaggctatttcatattaggacaacgactgacgcattgggtattccgctggggtag

SEQ ID NO: 5459 - protein, 487 aa, Aspergillus niger CBS 513.88
MGDVAVETPANNVTPLTKAAPLDTIPNIDSLEGTGNDGSDEYATLKRLQRHLEYIQLQEEYIKDEQRQSLKRELVRAQEEIKRIQSVPLVIGQFMEAIDQNTGIVQSSTGSNYVVRILSTLDREKLKPSSSVALHRHSNALVDILPPEADSSIAMLGENEKPDVTYADVGGLDMQKQEIREAVELPLTQFDLYKQIGIDPPRGVLLYGPPGTGKTMLVKAVANSTTASFIRVNGSEFVQKYLGEGPRMVRDVFRMARENSPAIIFIDEIDAIATKRFDAQTGADREVQRILLELLNQMDGFEQSSNVKVIMATNRADTLDPALLRPGRLDRKIEFPSLRDRRERRLIFSTIASKMSLSPEVDLDSLIVRNEPLSGAVIAAIMQEAGLRAVRKNRYNIIQSDLEDAYAAQVKTGQEADRYGTFSNLPAIGTWLTKHIDSNSTGKSSMGRASGWISDYARRTGGPLAVLSTSRLFHIRTTTDALGIPLG

SEQ ID NO: 5460 - DNA, 1569 bp, Pichia guilliermondii ATCC 6260
  CDS (1)..(1569): transl_table=12
atgtatatagaactggaattaaagcagaacaagctcaaaaatccaattcgtagaactctttgctcccacttgctcaacagtttcagctctattgcagccttgatatatatgcacccatacaccagtccgtctcacaaaccaaaggtggcgatcgcgagtagtcgactactagtacttcactcgatcaatttatcatggtatgtattatttttcacagacgctaactgcaccagattactaacccagggtcaaggtccatccggcatgcctggaggcgaaggcttcggtaaaaagaaagacgacaagaagaaggagaaacctaaatatgaaccacctgtcgagtccaaattcggaaagaaaagaagaaagggtccggacacagcggtgaaacttccaagcgtttaccccaatactcgctgtaagttgaagttgttgaaacttgaacgaatcaaggatcatttattgttggaagaagagtatgttaccaaccaagaagcgttccaacccacagaggcgaaacaagttgaagaaagagagaaggtggacgatcttcgtggctatccaatgtctatcggtactttggaggagattatagatgacgatcatgccattgtgtccagcactgcaggttcggagtactatgtgagcatcatgtcatttgtggataaaggcttgttagagcccagttgttcagtgttattacaccacaagacggtgtcgattgtaggtgtccttcaagacgatgctgatcctatggtatctgtcatgaaactcgacaagtctccgaccgagtcatacgccgacattggtggactcgaagcacaaatccaagagatcaaggaatcggtcgagttgccgttgacgcatcccgaattatatgaagaaatgggaattaaaccaccaaagggtgtgattctttacggtgctcccggtaccggtaagacgttattggcgaaggctgtagcgaaccaaacgagtgccacattcttgcgtattgtgggatcagaattgattcagaaatacttgggtgacggtccaaggttatgtcgacaaattttccaaatcgcagcagaacatgctccctctatcgtgtttatcgacgagattgatgccatcggtagtaaacgttatgaatcgtcttcaggtggtgaacgtgaaattcaaagaaccatgttggaacttttgaatcaattggatggtttcgacgaccgtggagatatcaaggtaatcatggcaaccaataagatcgaatcattggatcccgccttgattcgtcctggaagaatcgacagaaaaatcttattcgagaatcctgattcaaataccaaaagaaagatcttgacgatccacacatcaaaaatgagcttggctgatgatgtaaaccttgaagagttggtcacttcgaaggatgatttatcaggcgctgatatcaaggcaatgtgcacagaggccggattgttggctttgagagaaagaagaatgcaagtcaaagccgatgactttaaagctgcgaaggaaagagtattgaagaacaaggtggaggagaaccttgaagggttgtatttgtag

SEQ ID NO: 5461 - protein, 522 aa, Pichia guilliermondii ATCC 6260
MYIELELKQNKLKNPIRRTLCSHLLNSFSSIAALIYMHPYTSPSHKPKVAIASSRLLVLHSINLSWYVLFFTDANCTRLLTQGQGPSGMPGGEGFGKKKDDKKKEKPKYEPPVESKFGKKRRKGPDTAVKLPSVYPNTRCKLKLLKLERIKDHLLLEEEYVTNQEAFQPTEAKQVEEREKVDDLRGYPMSIGTLEEIIDDDHAIVSSTAGSEYYVSIMSFVDKGLLEPSCSVLLHHKTVSIVGVLQDDADPMVSVMKLDKSPTESYADIGGLEAQIQEIKESVELPLTHPELYEEMGIKPPKGVILYGAPGTGKTLLAKAVANQTSATFLRIVGSELIQKYLGDGPRLCRQIFQIAAEHAPSIVFIDEIDAIGSKRYESSSGGEREIQRTMLELLNQLDGFDDRGDIKVIMATNKIESLDPALIRPGRIDRKILFENPDSNTKRKILTIHTSKMSLADDVNLEELVTSKDDLSGADIKAMCTEAGLLALRERRMQVKADDFKAAKERVLKNKVEENLEGLYL

SEQ ID NO: 5462 - DNA, 1254 bp, Pichia guilliermondii ATCC 6260
  CDS (1)..(1254): transl_table=12
atggaagaacttggaatccatgacggtggctcggtggccatccagcggccttcagctccgtttgcagaattgcctaaacacgccggtgccgatgaaaatgccgacgtatatttgaagctcaagaagttggagaaagagttggatttgcttctcctccaagaagattacatcaaagacgaacagcgccatctcaagcgcgagctcgtaagagcgcaggaagaggtcaagcgtattaaatctgtgccattagtcatcgggcagtttttggaaccagtcgacgaggacagcggaattgtgtcgtcgaccacaggttcgaactatgtggttagaattctttccacgttagaccgtgaacttctcaaaccttcatcctcagtcgctttgcaccgtcactccaatgcattggttgatattctccctccagaagctgactcctcaatttccatcgtgggcgacgaccagaaaccagatgtcacctacgccgatgtcggaggattggacatgcaaaagcaagaaataagagaagcggttgagttgccacttactcagggtgacctctactcgcaaattggtatcgatcctccccgcggtgtcttgttatatggacctcccggaaccggtaaaaccatgttggtgaaagcagtcgccaactcgtccacagcatcgttcattagaattaatggatcagaattcgtgcaaaagtacctcggagaaggtcccagaatggtacgagacgttttccgtctcgctcgtgaaaacgctccagccatcatattcatagatgaaatcgatgcaatcgcaaccaagagattcgatgcccagactggtgctgatcgtgaagtccaaagaatcttattggaattgttgaatcaaatggatggtttcgaccaatcctccaccgtcaaggtaatcatggcaactaatagagccgacaccctcgatcctgccttattgcgccctggtaggttggacagaaaaatcgagttcccttcgttgaaagacaggcgtgagagaagattgattttcacaaccattgcttccaagatggctttagctcctgaagtcgatttggactctctcattgtcagaaacgaccccctttccggtgcggtcattgcagctatcatgcaagaagcaggtttgagagcggtgagaaagaacaggtatatgatcttgcaaagcgatttggaagaagcatatacatcccaggtcaagacaggtactgagcacgacaaattcgacttttacaagtga

SEQ ID NO: 5463 - protein, 417 aa, Pichia guilliermondii ATCC 6260
MEELGIHDGGSVAIQRPSAPFAELPKHAGADENADVYLKLKKLEKELDLLLLQEDYIKDEQRHLKRELVRAQEEVKRIKSVPLVIGQFLEPVDEDSGIVSSTTGSNYVVRILSTLDRELLKPSSSVALHRHSNALVDILPPEADSSISIVGDDQKPDVTYADVGGLDMQKQEIREAVELPLTQGDLYSQIGIDPPRGVLLYGPPGTGKTMLVKAVANSSTASFIRINGSEFVQKYLGEGPRMVRDVFRLARENAPAIIFIDEIDAIATKRFDAQTGADREVQRILLELLNQMDGFDQSSTVKVIMATNRADTLDPALLRPGRLDRKIEFPSLKDRRERRLIFTTIASKMALAPEVDLDSLIVRNDPLSGAVIAAIMQEAGLRAVRKNRYMILQSDLEEAYTSQVKTGTEHDKFDFYK

SEQ ID NO: 5464 - DNA, 1206 bp, Lodderomyces elongisporus NRRL YB-4239
  CDS (1)..(1206)
atgtctactgcggttgataaaccatatacccacgagagcggaattcgtccatatttcgaacaacagattcaagacaccgaaattgaaatacaacaaaccactcagaatctacgcagacttgaagcgcaacgtaataagcttaacaatagcgtaaggcagttaaaggatgagttgaggttgcttcaagaacccggctcgtatgttggcgaggtaattaaagtaatgggtacaaagaaagtcttggtcaagatccatcctgaaggaaaatacatcgtcaatgtcacgaaagacgttgacatcaagaaattgactccgtcgataagagtgtgcctcaaagctgatagccatgacttgtacaagattttgcccaataaagtcgacccattggtatccttgatgatggtggaaaaggttcctgattccacttatgatatggtgggaggattggacaagcagatcaaggagatcaaagaagtcattgaattaccagtcaagtatccagaattattctcaagtttgggaatagcacagcccaagggtgtcattttgtacggtccaccgggaactggaaagaccttgttggcacgagcagtggcccaccacactgattgtaaattcattcgtgtttcagggtcagagttggtacaaaagtatattggtgagggttctaggatggtgagggagttgttcgttatggcaagagagcatgctccatcgattatttttatggacgagattgattctattgggtcttcaagggtggaaggctcgtctggaggagactctgaagttcagagaactatgttggagttgttgaatcaattagatgggtttgagagctcaaaagatattaagatcattatggctacgaacaggctagatattttggatccggctcttttgcgtccaggaagaatcgatagaaaaatcgagtttcctgcccctactttgcaagctagaacagacatcttgagaattcactcaaggtcgatgaacttgactagagggatcaatttgaaaaaaattgcggaaaagatgaatggatgttcaggtgccgacgtcaagggtgtttgtactgaggctggtatgtacgcgctcagagagagaaggatacacgttacgcaggaagatttcgaattggcagtggcgaaggtgatgtccaagaatgatgagggtacagtttcacttcaaaagttgttcaagtag

SEQ ID NO: 5465 - protein, 401 aa, Lodderomyces elongisporus NRRL YB-4239
MSTAVDKPYTHESGIRPYFEQQIQDTEIEIQQTTQNLRRLEAQRNKLNNSVRQLKDELRLLQEPGSYVGEVIKVMGTKKVLVKIHPEGKYIVNVTKDVDIKKLTPSIRVCLKADSHDLYKILPNKVDPLVSLMMVEKVPDSTYDMVGGLDKQIKEIKEVIELPVKYPELFSSLGIAQPKGVILYGPPGTGKTLLARAVAHHTDCKFIRVSGSELVQKYIGEGSRMVRELFVMAREHAPSIIFMDEIDSIGSSRVEGSSGGDSEVQRTMLELLNQLDGFESSKDIKIIMATNRLDILDPALLRPGRIDRKIEFPAPTLQARTDILRIHSRSMNLTRGINLKKIAEKMNGCSGADVKGVCTEAGMYALRERRIHVTQEDFELAVAKVMSKNDEGTVSLQKLFK

SEQ ID NO: 5466 - DNA, 1323 bp, Lodderomyces elongisporus NRRL YB-4239
  CDS (1)..(1323)
atgggtcaaggatcttcgatgccaggtggtgcaaaccccaacaagaagaaagatgataaaaagaaagagaaaccaaagtatgagccaccagtggaatccaagtttggtaaaaagagaagaaagggtccagataccgcagtgaaattacctacagtgtatccaaacacaagatgtaaattgaagttattgaagttggaaagaatcaaagaccacttgttgttagaagaggagttggtgttcaaccaagaggcagtacaaccaacagaggcgagacaggcagaggaaagggaaaagattgatgaattacgaggttacccaatggctatcggaacattggaggagattatcgacgatgatcacgctattgtttccagtacagcaagctcggagtattatgttccaatcatgtcctttgttgataaagggttattggagcctggatgctcagtcttgctacatcacaagactgtggctgttgttggtgtgcttcaagacgatgctgacccaatggtatcggtgatgaaattggacaagtcgccgacagaatcatatgccgatattggtggtttggaatcacagattcaagagattaaggaatctgttgaattaccattaactcatcctgaattgtatgaagaaatgggtatcaagccaccaaagggtgttatattgtatggtgcaccaggtaccggtaaaacacttttagccaaggcagtggcgaacctgacgtcagcaactttcttgagaattgtaggttcagaattgattcaaaagtacttgggtgatggaccaaggttgtgtagacagatctttcaaatcgcagcagaacatgcaccatcaattgtctttatagatgaaatcgatgctattggtacaaagagatacgagtcaacttcaggaggagaaagagaaattcaaagaaccatgttggaattgttaaaccaattggatggtttcgatgatagaggcgacatcaaggtaatcatggccacgaataaaatagagagccttgatccagcgttaattagacctggaagaattgatagaaagattctttttgaaaatccagatgctaatacaaagaaaaagattcttaccattcatacatcaaagatgaatttggcagaagatgtcaatttggatgagattgttacaggaaaagatgatttatcaggtgctgacattaaggcaatttgtaccgaggctggtcttttggcattaagggaaagacgaatgcaagtcaaggcggatgatttcaaagctgctaaggaacgtgtcttgaagaataaggtagaggagaatttggaaggtttatacttgtaa

SEQ ID NO: 5467 - protein, 440 aa, Lodderomyces elongisporus NRRL YB-4239
MGQGSSMPGGANPNKKKDDKKKEKPKYEPPVESKFGKKRRKGPDTAVKLPTVYPNTRCKLKLLKLERIKDHLLLEEELVFNQEAVQPTEARQAEEREKIDELRGYPMAIGTLEEIIDDDHAIVSSTASSEYYVPIMSFVDKGLLEPGCSVLLHHKTVAVVGVLQDDADPMVSVMKLDKSPTESYADIGGLESQIQEIKESVELPLTHPELYEEMGIKPPKGVILYGAPGTGKTLLAKAVANLTSATFLRIVGSELIQKYLGDGPRLCRQIFQIAAEHAPSIVFIDEIDAIGTKRYESTSGGEREIQRTMLELLNQLDGFDDRGDIKVIMATNKIESLDPALIRPGRIDRKILFENPDANTKKKILTIHTSKMNLAEDVNLDEIVTGKDDLSGADIKAICTEAGLLALRERRMQVKADDFKAAKERVLKNKVEENLEGLYL

SEQ ID NO: 5468 - DNA, 1167 bp, Lodderomyces elongisporus NRRL YB-4239
  CDS (1)..(1167)
atggagggaggcacagatgtttacttacaccacaaaagtcttctcaaggaacttaatcttttgaagatccaggaagagtatatcaaagatgagcaacgccaccttaagcgcgagttgatccgtgcacaagaagaggtcaaacgaatcaagtccgtgccgttggtgattggtcaattcttggaacctatagatgagagcactggtattgtttcttcaacaacgggatctaattatgttgtgcgtatattatctacattggaccgtgaattgcttaaacaatcttcgtcggtggcattgcaccgtcactccaatgctctagttgatattcttccaccagaggcagattcatcgatttcgattgtgggtgataatgagaaacctgatgtgacatatgcagatattggtgggctagacatgcagaagcaagagattattgagtctgttgagttgccattggagcaatctcatttatatagtcaaattggaattgatccaccaagaggtgtcttgttgtatggtccaccgggtactggtaaaacgatgttggtgaaggcagtggcgaatgcaaccaaggcatcattcataaggatcaatggttcagagtttgtacagaaatatcttggtgaaggtccaaggatggtgagagatgtgtttaggttggcaagggagaattcgccagcaattatatttattgatgaaattgatgctattgccacgaagagatttgacgctcaaactggtgctgatcgtgaagtgcagagaatcttgttggaattgttgaatcagatggatgggtttgaccagacgtcgaatgtcaaagtgattatggctacaaatagagctgacactttggaccctgcattattgagaccaggtagattggacagaaagattgaattcccaaacttaaaggatagaagagaacggaggttgatttttacaaccattgcatccaagatgtcgcttgcacctgaagtcgacttggactcgttgattataagaaacgatccattgtctggtgcagtgattgccgctataatgcaagaagccggattgcgagctgtgaggaagaacagatatatgattctacaaaatgatttggaggaagcatacagttcacaagtcaagacaggaactgaacacgataaatttgaattctataaatag

SEQ ID NO: 5469 - protein, 388 aa, Lodderomyces elongisporus NRRL YB-4239
MEGGTDVYLHHKSLLKELNLLKIQEEYIKDEQRHLKRELIRAQEEVKRIKSVPLVIGQFLEPIDESTGIVSSTTGSNYVVRILSTLDRELLKQSSSVALHRHSNALVDILPPEADSSISIVGDNEKPDVTYADIGGLDMQKQEIIESVELPLEQSHLYSQIGIDPPRGVLLYGPPGTGKTMLVKAVANATKASFIRINGSEFVQKYLGEGPRMVRDVFRLARENSPAIIFIDEIDAIATKRFDAQTGADREVQRILLELLNQMDGFDQTSNVKVIMATNRADTLDPALLRPGRLDRKIEFPNLKDRRERRLIFTTIASKMSLAPEVDLDSLIIRNDPLSGAVIAAIMQEAGLRAVRKNRYMILQNDLEEAYSSQVKTGTEHDKFEFYK

SEQ ID NO: 5470 - DNA, 1170 bp, Ajellomyces capsulatus NAm1
  CDS (1)..(1170)
atggcgctcgataactattttcgcaacaagatagagagcatgaagcttgaaatcatccaaggccaagctgtcttgaggcggcttgaagcacaacggaatgactacaactccagagtaaggctgctacgggaagagcttggtctgttacaacaaccgggatcttacgtcggcgaagtggtcaaggttatgggcactaagaaggtgcttgtcaaggtacatccggaagggaaatacgttgttgatgtcgcggataatgtcgacatctccaagctcacagtagggaaacgagtgtcactgctctcggattcatacaagctcgaaaaaatgcttccatcatcagttgacccgctcgtatcgctgatgatggttgagaaagtcccagacagcacatacgacatgatcggtggccttgatcaacaaatcaaggaaatcaaagaagtcatcgaactcggcctcaatcacccggaactcttcgagtcgctaggtattgcacagccaaagggcgtactcttatatggacctccagggaccggcaaaactctcctcgcacgagcagtggcacatcacgcagattgcaagttcatccgggtgagtggttcggagctggttcagaagtatataggtgaaggcagcaggatggtcagggagttgttcattatggctcgcgaacatgctcccagcattattttcatggacgagattgacagtatcggatccagtcgtgtggaaggcagtagtggaggagactccgaggtccaacgcaccatgttggaactcctgaatcaactggacggattcgaacctacgaagaacattaaaataataatggctaccaatcgtcttgatatcctcgaccctgctctcctaagacctggaagaatcgaccgaaagattgaatttcccccacccactgtcgaagcccgcgcagacatcctccgcatccactccagatccatgaacctaacccgcggcatcaacctcactaagatcgctgagaagatgaatggctgctccggcgcagagctcaagggcgtctgcacagaggccggcatgtatgcattgcgcgagcgccgagtacatgttacacaggaggattttgacctggcgactgccaaggtgcttaacaaacacgacgacaaggaaatcagtttgcagaaattcttcaaataa

SEQ ID NO: 5471 - protein, 389 aa, Ajellomyces capsulatus NAm1
MALDNYFRNKIESMKLEIIQGQAVLRRLEAQRNDYNSRVRLLREELGLLQQPGSYVGEVVKVMGTKKVLVKVHPEGKYVVDVADNVDISKLTVGKRVSLLSDSYKLEKMLPSSVDPLVSLMMVEKVPDSTYDMIGGLDQQIKEIKEVIELGLNHPELFESLGIAQPKGVLLYGPPGTGKTLLARAVAHHADCKFIRVSGSELVQKYIGEGSRMVRELFIMAREHAPSIIFMDEIDSIGSSRVEGSSGGDSEVQRTMLELLNQLDGFEPTKNIKIIMATNRLDILDPALLRPGRIDRKIEFPPPTVEARADILRIHSRSMNLTRGINLTKIAEKMNGCSGAELKGVCTEAGMYALRERRVHVTQEDFDLATAKVLNKHDDKEISLQKFFK

SEQ ID NO: 5472 - DNA, 1269 bp, Ajellomyces capsulatus NAm1
  CDS (1)..(1269)
atgggagacgtcgtggttgcgagctcagcggcccttgcgccgccgtacaaaaggaccacacctgcacacgcgaccccgaatatcgatcctctggaaggagttggaaatgactatggagatgactatactacgctcaagagattacaacgacacctagagtatttaaaccttcaagaggaatatatcaaggacgagcagaggagcttgaagcgggaacttgttcgagcccaagaagaaattaaacgcatccaaagtgttccccttgtcataggccagttcatggaggctatcgaccaaaacaccggtatagtacaatcgtcaacaggctcgaattatgtcgtccgcatactatctacacttgaccgcgaactgttgaagccttcctcatccgtcgctctacatcgccattccaactccctcgtcgacatacttccacctgaagctgattcttccattgctatgcttggcattgacgaaaagccagacgtgacatatgcggacgtgggaggactggatatgcagaaacaggagattagagaagccgtcgaactaccgctaacgcatttcgatttatacaaacaaattggaatcgaccctccgcgcggtgtgcttctatatggaccacccggaaccggcaaaaccatgcttgtcaaggcggtagccaacggcacaacagccaacttcatccgagttgtcggatccgagttcgttcaaaagtacctaggcgaaggtcctcgaatggtccgcgatgttttccgcatggcccgcgaaaatgccccagccatcatcttcatcgacgaaatcgatgccatcgctacaaagcgattcgacgctcaaacaggtgctgatcgcgaggtgcaacgtatcttgctggaattgctcaatcaaatggacggcttcgatcagacaagcaacgtaaaagtcatcatggcgaccaaccgcgccgacacgctggatcctgcactgctgcggcctggtcgtctcgatcgcaagattgaattcccctcgctgcgcgatcgacgagagcgccggttgattttcaccaccattgcttccaagatgtctctgtcgccggaggtagatctggactcgttgattgttcggaatgatccgctatcgggcgctgtcattgccgccatcatgcaggaagctggcctgcgagcagttcgcaagaacagatacaatatcatccagtcggacttggaagacgcttattcgagccaagtcaagggagcacaggatgctgataagttcgacttctaccgctaa

SEQ ID NO: 5473 - protein, 422 aa, Ajellomyces capsulatus NAm1
MGDVVVASSAALAPPYKRTTPAHATPNIDPLEGVGNDYGDDYTTLKRLQRHLEYLNLQEEYIKDEQRSLKRELVRAQEEIKRIQSVPLVIGQFMEAIDQNTGIVQSSTGSNYVVRILSTLDRELLKPSSSVALHRHSNSLVDILPPEADSSIAMLGIDEKPDVTYADVGGLDMQKQEIREAVELPLTHFDLYKQIGIDPPRGVLLYGPPGTGKTMLVKAVANGTTANFIRVVGSEFVQKYLGEGPRMVRDVFRMARENAPAIIFIDEIDAIATKRFDAQTGADREVQRILLELLNQMDGFDQTSNVKVIMATNRADTLDPALLRPGRLDRKIEFPSLRDRRERRLIFTTIASKMSLSPEVDLDSLIVRNDPLSGAVIAAIMQEAGLRAVRKNRYNIIQSDLEDAYSSQVKGAQDADKFDFYR

SEQ ID NO: 5474 - DNA, 1170 bp, Botryotinia fuckeliana B05.10
  CDS (1)..(1170)
atggcgttggatagcttctttcacaataagattgagagcatgaagctcgaaatcattcaaggtcaagcggttctacgaagattagaagcgcaacgcaatgactacaactcaagagtgcgacttctacgagaggagctcggcttactacaacagccgggatcctatgttggtgaggtggtaaaggttatgggcacaaagaaggtgttggtcaaggtgcacccagaaggcaaatatgtcgtcgatatcgcggatagtgtcgacatctcaaaacttaccgttggaaagagggttacccttctatcggattcctacaaactcgaaaagatgctcccatcatccgtcgatcctctcgtttccctcatgatggtcgaaaaggttccagatagtacgtacgatatgattggtggtttagatcaacaagtaaaggaaatcaaggaggtcattgagcttggtcttaagcatcccgaacttttcgaatctcttggtatagcacaacctaaaggtgttcttctttacggacccccaggaacaggaaagactttgttggcaagagctgtcgcacatcacaccgactgtagattcattcgagtttctggttctgaactggttcaaaaatatattggtgagggttcaagaatggtcagagagctattcgtcatggcaagagagcacgctccttccatcatcttcatggacgaaatcgattctattggatcttcgcgtgtggaaggatcttcaggtggtgattctgaagtccaaagaactatgttggaactactgaatcaattggatggtttcgagccaaccaagggaattaaggtcatcatggctaccaatcgtctagacattttggatccggcacttttacgaccaggacgtatcgatagaaagatcgaatttccacctccaactgttgaggctagagccgatattttacgaattcacagccgcagcatgaacctgactcgtggtatcaacttgacgaagattgcagagaagatgaacggatgttcaggagctgagttgaagggtgtttgcacggaagctggaatgtacgccttgagagaacgcagagttcatgtcactcaagaggatttcgatttggcgacagcgaaggtattgaacaagcatgacgacaaggaagtcagtttgggcaagttatggaagtag

SEQ ID NO: 5475 - protein, 389 aa, Botryotinia fuckeliana B05.10
MALDSFFHNKIESMKLEIIQGQAVLRRLEAQRNDYNSRVRLLREELGLLQQPGSYVGEVVKVMGTKKVLVKVHPEGKYVVDIADSVDISKLTVGKRVTLLSDSYKLEKMLPSSVDPLVSLMMVEKVPDSTYDMIGGLDQQVKEIKEVIELGLKHPELFESLGIAQPKGVLLYGPPGTGKTLLARAVAHHTDCRFIRVSGSELVQKYIGEGSRMVRELFVMAREHAPSIIFMDEIDSIGSSRVEGSSGGDSEVQRTMLELLNQLDGFEPTKGIKVIMATNRLDILDPALLRPGRIDRKIEFPPPTVEARADILRIHSRSMNLTRGINLTKIAEKMNGCSGAELKGVCTEAGMYALRERRVHVTQEDFDLATAKVLNKHDDKEVSLGKLWK

SEQ ID NO: 5476 - DNA, 1401 bp, Botryotinia fuckeliana B05.10
  CDS (1)..(1401)
atgggtcaacaaccatccggccttggtggtaatcagccaggtggagatggaaaagatgacaagtctaagaagaaggataagccaaagtacgagccaccaccaagaccaacaactagaatcggtcgcaagaagcgtaaggctgcaggaccaaatgcctccgcaaagctaccagccgtctatccgacatcccgatgcaaactccgatatcttcgaatgcaacggattcacgatcatttgctcctcgaagaagaatatgttgagaaccaggaacgtctgagaaaggccaaggctgcaaaggaagggacagcagcacccgctaatgctggaggtgacgcagatgccgctgacagaaacgccgatgagagaggtcgtgttgatgatatgcgtggtagtccaatgggtgttggaactttggaggaaatgattgatgatgatcatgctatcgtttcgagtaccaccggaccggaatactacgtctccatcatgtcttttgtcgacaaagatctcttggagccaggtgcgagtgtattgctgcatcacaaatccgtttcgattgttggtgttcttaccgacgacacggatcctttggtttcagtgatgaagcttgacaaagctccaacggaatcttacgcagatattggtggtctcgagtcgcagattcaagaagtgcgagaatcagtcgagctaccattattacatcctgaattatatgaggagatgggtatcaagccccccaagggtgttattctttatggtgcgccaggtaccggaaagactttattggcaaaggcggttgcaaatcaaacaagtgcaacgttcttgcgaattgttggtagtgagttgattcagaagtacttgggtgatggacctagacttgttcgacaacttttccaggttgccgccgaaaatgcaccatccatcgtcttcattgatgaaattgacgccatcggtactaaacgttacgaatctacatctggtggagaacgtgaaattcaaagaactatgttggagcttcttaatcaacttgatggtttcgatgaccgtggagacgttaaggttatcatggctacaaacaagattgatactcttgaccctgctctcattcgtccaggacgtatcgaccgaaagattcttttcgagaatcctgaccaacatactaaacgcaagattttcactcttcacacatctaagatgtccttgaacgaagatgtcgatttggaagaattcattaaccaaaaggatgatctttccggtgctgatatcaaggcgatctgttctgaggctggtttgatggcactgagagagcgtagaatgcgtgtccaaatggcggatttcagggctgcaagggaacgtgtcttgaagacaaagagtgagggcgaacctgagggtttgtacttgtag

SEQ ID NO: 5477 - protein, 466 aa, Botryotinia fuckeliana B05.10
MGQQPSGLGGNQPGGDGKDDKSKKKDKPKYEPPPRPTTRIGRKKRKAAGPNASAKLPAVYPTSRCKLRYLRMQRIHDHLLLEEEYVENQERLRKAKAAKEGTAAPANAGGDADAADRNADERGRVDDMRGSPMGVGTLEEMIDDDHAIVSSTTGPEYYVSIMSFVDKDLLEPGASVLLHHKSVSIVGVLTDDTDPLVSVMKLDKAPTESYADIGGLESQIQEVRESVELPLLHPELYEEMGIKPPKGVILYGAPGTGKTLLAKAVANQTSATFLRIVGSELIQKYLGDGPRLVRQLFQVAAENAPSIVFIDEIDAIGTKRYESTSGGEREIQRTMLELLNQLDGFDDRGDVKVIMATNKIDTLDPALIRPGRIDRKILFENPDQHTKRKIFTLHTSKMSLNEDVDLEEFINQKDDLSGADIKAICSEAGLMALRERRMRVQMADFRAARERVLKTKSEGEPEGLYL

SEQ ID NO: 5478 - DNA, 1266 bp, Sclerotinia sclerotiorum 1980
  CDS (1)..(1266)
atgggtgacgttttattagagaaccctgcgacccaggttttgcctcaccgaaaaccattgccatcctcaataccaaacatcgattcgctggagggattgggaacagatggtagtgatgagtattcaacattgaagaagcttcaaaggcatttagaatatattcaacttcaggaagaatacatcaaggatgaacaacgaagcttgaagagagaacttgtgcgagctcaagaagaaatcaaacgtattcagagtgtacctttagtgataggacaattcatggaagctatcgatcaaaatactggtatcgtacaatcatccacaggatctaactatgttgttcgaatcttatctactctcgatcgcgaacttttgaaaccatcatcctctgtcgcactccacagacattcaaattctttggtcgacatcttacctcccgaagccgattcatcaattgctatgttaggatccgatgagaaaccagatgttacatatgcagatgttggaggacttgatatgcaaaagcaagaaattcgagaagcagttgaacttccattaacacatttcgacctatacaagcaaattggtatcgatccaccacgaggtgttttactttatggtccacccggaactggaaaaactatgctcgtcaaggcagtagcaaattcaacaactgcaaacttcattcgtgtcgttggatcggagttcgtacaaaagtatcttggagaaggaccacgtatggttcgtgatgtgttccgtatggcccgtgaaaattccccagctatcatctttattgatgaaatcgatgccatcgccacgaaacgtttcgatgcacaaactggtgccgatagagaagttcaacgtattcttcttgaacttttgaatcaaatggatggtttcgatcaaacatctaatgttaaagtcattatggctaccaaccgtgccgatactctcgatcctgctttacttcgtccaggtcgattggacagaaagattgagttccccaaccttcgcgatcgcagagagagacgattgatttttactactattgcatcaaggatgtcattgtcaccagaagttgatcttgatagtttgatcattcgaaatgatccattatctggtgctattattgcagctatcatgcaagaggcaggtttgagagcagtgagaaagaataggtacaacattattcaatctgatcttgaagatgcctattctagtcaagttaaaggtgcacaagaggccgataaattcgacttctacaaataa

SEQ ID NO: 5479 - protein, 421 aa, Sclerotinia sclerotiorum 1980
MGDVLLENPATQVLPHRKPLPSSIPNIDSLEGLGTDGSDEYSTLKKLQRHLEYIQLQEEYIKDEQRSLKRELVRAQEEIKRIQSVPLVIGQFMEAIDQNTGIVQSSTGSNYVVRILSTLDRELLKPSSSVALHRHSNSLVDILPPEADSSIAMLGSDEKPDVTYADVGGLDMQKQEIREAVELPLTHFDLYKQIGIDPPRGVLLYGPPGTGKTMLVKAVANSTTANFIRVVGSEFVQKYLGEGPRMVRDVFRMARENSPAIIFIDEIDAIATKRFDAQTGADREVQRILLELLNQMDGFDQTSNVKVIMATNRADTLDPALLRPGRLDRKIEFPNLRDRRERRLIFTTIASRMSLSPEVDLDSLIIRNDPLSGAIIAAIMQEAGLRAVRKNRYNIIQSDLEDAYSSQVKGAQEADKFDFYK

SEQ ID NO: 5480 - DNA, 1401 bp, Sclerotinia sclerotiorum 1980
  CDS (1)..(1401)
atgggtcaacaaccgtctggtcttggtggtaaacaaccaggaggagatggaaaagatgataaatccaagaagaaggataagccaaagtacgaaccaccaccaagaccaacaactagaatcggccgcaagaagcgtaaggctgctggtccaaatgcatccgcaaagttaccagccgtgtatcctacatctcgatgcaaacttaggtatcttcgaatgcagcgaattcacgatcatttactcctcgaagaagaatatgttgaaaaccaggaacgtttaagaaaggccaaggctgcaaaggaagggactgcagcgcccgcgaccgctggaggcgatgcagatgccgctgacagaaatgctgatgagagaggacgtgtggatgatatgcgtggtagtccgatgggggttggaactttggaggaaatgattgatgatgatcatgctattgtttcaagtaccactggtcctgaatactatgtctccatcatgtctttcgtcgataaagatctcttggagcccggtgcaagtgttttgctacatcacaaatccgtctcgattgttggtgttctcactgatgacactgatcctttggtttcggtaatgaagctcgacaaagctccaacagaatcctacgcagatattggtggtctggaatcgcagatccaggaagtgcgggaatcggtcgaattaccattattacaccctgaattgtacgaggagatgggtatcaagccacccaagggtgttattctctatggtgcaccaggtactggaaagactctgttggcgaaagcggttgcaaatcagacgagtgcgacattcttgcgaatcgttggtagtgagttgatccaaaagtacttgggagatggacctagactcgttcgacaacttttccaggttgctgccgaaaacgcaccatcgatcgtcttcattgatgaaattgacgccattggtacaaaacgttacgaatctacatctggtggagaacgtgaaatccaaagaactatgttggagcttctcaatcaacttgatggttttgacgaccgtggagatgtcaaagttattatggctacaaacaagattgatactcttgaccctgctctcatccgtcctgggcgtatcgaccgaaaaattcttttcgagaatcctgatcaacacactaagcgcaagatcttcacccttcacacatctaaaatgtccttgaacgatgatgtcgacttggaagaattcatcaaccagaaggacgatctttcgggtgctgatatcaaggcgatctgttctgaagctggattgatggcattaagagagcgtagaatgcgtgtccaaatggcggatttcagggctgcaagagaacgtgtcttgaagactaagagtgagggtgagcctgagggcttgtacttgtaa

SEQ ID NO: 5481 - protein, 466 aa, Sclerotinia sclerotiorum 1980
MGQQPSGLGGKQPGGDGKDDKSKKKDKPKYEPPPRPTTRIGRKKRKAAGPNASAKLPAVYPTSRCKLRYLRMQRIHDHLLLEEEYVENQERLRKAKAAKEGTAAPATAGGDADAADRNADERGRVDDMRGSPMGVGTLEEMIDDDHAIVSSTTGPEYYVSIMSFVDKDLLEPGASVLLHHKSVSIVGVLTDDTDPLVSVMKLDKAPTESYADIGGLESQIQEVRESVELPLLHPELYEEMGIKPPKGVILYGAPGTGKTLLAKAVANQTSATFLRIVGSELIQKYLGDGPRLVRQLFQVAAENAPSIVFIDEIDAIGTKRYESTSGGEREIQRTMLELLNQLDGFDDRGDVKVIMATNKIDTLDPALIRPGRIDRKILFENPDQHTKRKIFTLHTSKMSLNDDVDLEEFINQKDDLSGADIKAICSEAGLMALRERRMRVQMADFRAARERVLKTKSEGEPEGLYL

SEQ ID NO: 5482 - DNA, 1248 bp, Nasonia vitripennis
  CDS (1)..(1248)
atggaagaaatgagcatcaccgtgccagataaggacgttgctgaagttgacatgaagccagtgattggacatggaactggagctatggaggaactagacgttgaagatctttatactaaatataagaaactacaacgaatgcttgaatttttggaagtccaagaagaatacatcaaagatgagcaaagaaacttgaaaaaagaatatttacatgctcaagaagaagtgaaacgtatacaaagtgtaccattagtgattggtcaatttttagaggcagttgatcaaaacactggaattgtcggttctacaaccggatctaactactatgtgcgcattttatcaactattgatcgagaactactaaagccatcagctagtgttgctttgcataaacacagcaatgccctggtggatgttttaccaccagaggcagattctagcatctctatgcttcaagcagatgagaagcctgatattctatacagtgacattggaggtatggacatgcaaaaacaagagataagagaagcagtagagctacctcttactcattttgaactttacaaacaaattggtattgacccgccaagaggtgttttgatgtatggtccaccaggttgtggaaaaactatgcttgctaaagctgttgccagacatacaacagctgctttcattcgtgtggttggatctgagtttgtgcaaaaatatctgggagaaggtccaagaatggtgagagacgtctttcgtttagcaaaagaaaactctccagctattatctttgtagacgaaattgatgctattgctacaaagcgttttgatgctcaaactggagctgatcgtgaagtacagcgtattctcttggagttgctaaatcaaatggacggttttgatcaaactaccaatgtcaaagttatcatggctactaacagagctgatactcttgaccctgctctgctgcgtccaggaagattggatcgtaaaattgaattcccactgcccgatcgtcggcaaaaacgactgattttttcaacaatcactacaaagatgaacttgagtgaggaagttgatcttgaagattatgttgctcgtccagacaaaatttctggtgctgatatcaatgctatctgtcaggaagctggaatgcacgctgtgcgcgaaaatcgttacatcgttcttgcgaaggacttcgagaagggttacaaaaacaacattaagaaagatgaatctgaacatgaattttataaataa

SEQ ID NO: 5483 - protein, 415 aa, Nasonia vitripennis
MEEMSITVPDKDVAEVDMKPVIGHGTGAMEELDVEDLYTKYKKLQRMLEFLEVQEEYIKDEQRNLKKEYLHAQEEVKRIQSVPLVIGQFLEAVDQNTGIVGSTTGSNYYVRILSTIDRELLKPSASVALHKHSNALVDVLPPEADSSISMLQADEKPDILYSDIGGMDMQKQEIREAVELPLTHFELYKQIGIDPPRGVLMYGPPGCGKTMLAKAVARHTTAAFIRVVGSEFVQKYLGEGPRMVRDVFRLAKENSPAIIFVDEIDAIATKRFDAQTGADREVQRILLELLNQMDGFDQTTNVKVIMATNRADTLDPALLRPGRLDRKIEFPLPDRRQKRLIFSTITTKMNLSEEVDLEDYVARPDKISGADINAICQEAGMHAVRENRYIVLAKDFEKGYKNNIKKDESEHEFYK

SEQ ID NO: 5484 - DNA, 1395 bp, Nasonia vitripennis
  CDS (1)..(1395)
atgggtcagaatcagtcaggcccaggaggcgctggcggggacaaaaaggatgataaagacaagaagaagaaatacgagccaccagttcctacaagagttggaaagaagaagcgtcgcacaaaaggtcctgatgcagctctaaaactacctcaagttacacctcacacaagatgcagactgaaacttttaaaacttgaacgcatcaaggactaccttctgatggaagaggaattcattaggaatcaagagcgcctgaagccacaggaagagaaaaatgaagaagaaaggtccaaggtagatgacttgagaggaaccccaatgtctgtaggaacattggaagaaatcattgatgataatcatgccattgtttccacctctgttggttcagaacattacgtttctattctctcctttgttgataaagatcaacttgaaccaggatgttcagtactgctgaatcataaagttcatgccgtagtcggagtattaggagatgatactgatccaatggtcactgtcatgaagctagaaaaggctccacaagaaacttatgctgatataggaggtcttgatgtccaaattcaagaaatcaaagaatcagttgagcttccaatgactcacccagagtattatgaagagatgggtataaaaccacccaaaggagttattttatatggtcctcctggtactggcaaaactctattagcaaaagcagtggctaatcaaacatctgcaactttcctcagagttgttggttcagaactcattcagaaatacttaggagatggaccaaaacttgttagagaacttttcagagttgctgaagagcatgccccgtctattgtctttattgacgaaattgatgctgttggaactaagcggtatgacagcaacagtggaggagaaagggaaattcagagaactatgcttgaacttctgaatcaactcgatggttttgatagcagaggtgatgttaaagtagtcatggctacaaatagaattgaaaccttggatcctgcactgatcagacctggcaggattgatagaaaaattgagttcccattaccagatgagaagactaaaaagaggatctttagtatacatactagtagaatgactttggcgcctgatgttaatcttactgaactgatcatggctaaagatgatttatctggtgcagatattaaggcaatatgtactgaggctggtctaatggcactgagagagcgtcgtatgaaagtcaccagtgaagacttcaaaaagtcaaaggagagtgtgttatatagaaaaaaagaaggttctccggaaaggtttatatttataaaaattcatatttgtattttatattcgccaataatttttttgcaattattattgaaaatatactcgaaataa

SEQ ID NO: 5485 - protein, 464 aa, Nasonia vitripennis
MGQNQSGPGGAGGDKKDDKDKKKKYEPPVPTRVGKKKRRTKGPDAALKLPQVTPHTRCRLKLLKLERIKDYLLMEEEFIRNQERLKPQEEKNEEERSKVDDLRGTPMSVGTLEEIIDDNHAIVSTSVGSEHYVSILSFVDKDQLEPGCSVLLNHKVHAVVGVLGDDTDPMVTVMKLEKAPQETYADIGGLDVQIQEIKESVELPMTHPEYYEEMGIKPPKGVILYGPPGTGKTLLAKAVANQTSATFLRVVGSELIQKYLGDGPKLVRELFRVAEEHAPSIVFIDEIDAVGTKRYDSNSGGEREIQRTMLELLNQLDGFDSRGDVKVVMATNRIETLDPALIRPGRIDRKIEFPLPDEKTKKRIFSIHTSRMTLAPDVNLTELIMAKDDLSGADIKAICTEAGLMALRERRMKVTSEDFKKSKESVLYRKKEGSPERFIFIKIHICILYSPIIFLQLLLKIYSK

SEQ ID NO: 5486 - DNA, 1254 bp, Nematostella vectensis
  CDS (1)..(1254)
atggaggaaatcggaattatacaaccacaggaggataagagtaccagcagtagaccaaccaccgccgggaccatcagttctctgtgtagccctgtagacccggagatggatgacctctacatcacatacaagaagctggaaaaacagctggagttcctggaagtccaggaagagtacatcaaagatgaacagaaaaacctgaagaaggagctgctgcatgctcaagaggaggtcaagagaatccagtcagttccactagtgattgggcagttcctggaagctgttgaccagaacactggtattgttgcttccacaactggctccaactattatgtcagaatcctctcaaccatagataaagagcttctaaaacccagtgcttcagtagcactacacaagcactcaaacgccctcgttgacatcctccctcctgaagctgatagtagtatagccatgcttacaaatgaagagaagcccaacgtctcgtacgctgagattggaggcatggatatacaaaagcaagagatcagagaagcagtagagttacctcttactcactttgagctctataaacaaattggcattgatccgcctagaggtgttctcctgtatggcccccctggctgcggcaagactatgctggccaaggcagtcgcgcaccacacaacagcagcattcatacgagttgttggctcagagtttgtccagaaatacttgggagaaggccctcgtatggtcagggatgtatttaggttagccaaggaaaatgcgcctgctatcattttcattgatgagattgatgccatagcaaccaagagatttgatgcgcagactggggctgacagagaggtacagaggatccttctggaattactcaaccaaatggatggatttgatcagaatgttaatgttaaggttatcatggcaacaaacagacaagatacactggaccctgccctgttacgacctggccggttggatcgtaagatagagttccctctgcctgaccgccgacagaagcgacttattttctcgaccataacaaataagatgaacctatcagaagaggttgacctagaggattatgtggcacgaccagacaagattagtggtgcagacattaatgctgtctgccaagaggctggtatgcaggcagtgcgggaaaacagatacattatcctggcaaaggactttgagaaaggatataaaaacaacgtcaagaaagacgaacaagaacatgagttctacaaataa

SEQ ID NO: 5487 - protein, 417 aa, Nematostella vectensis
MEEIGIIQPQEDKSTSSRPTTAGTISSLCSPVDPEMDDLYITYKKLEKQLEFLEVQEEYIKDEQKNLKKELLHAQEEVKRIQSVPLVIGQFLEAVDQNTGIVASTTGSNYYVRILSTIDKELLKPSASVALHKHSNALVDILPPEADSSIAMLTNEEKPNVSYAEIGGMDIQKQEIREAVELPLTHFELYKQIGIDPPRGVLLYGPPGCGKTMLAKAVAHHTTAAFIRVVGSEFVQKYLGEGPRMVRDVFRLAKENAPAIIFIDEIDAIATKRFDAQTGADREVQRILLELLNQMDGFDQNVNVKVIMATNRQDTLDPALLRPGRLDRKIEFPLPDRRQKRLIFSTITNKMNLSEEVDLEDYVARPDKISGADINAVCQEAGMQAVRENRYIILAKDFEKGYKNNVKKDEQEHEFYK

SEQ ID NO: 5488 - DNA, 1314 bp, Vanderwaltozyma polyspora DSM 70294
  CDS (1)..(1314)
atgggtcaaggtgtatcttctggtcaagataaaaagaagaagaaggatgggaaccaaaagcccaagtatgaacctcctgttcagtcaaagtttggtaggaaaaagagaaagcatggtccttccacagctgagaaattaccaaacatttatccaaatactagatgtaaattgaagttattaagaatggaaagaattaaagatcatttgttgttagaagaggagtttgtcactaattctgaaattttgaaaccgttcgagaaaaaacaagaagaagagaagaaacaattagctgaaattagaggtaacccattaagtataggtactttagaagaaatcattgatgatgaccatgctattgtaaccagtccaactatgccggattattacgtatctatattatcctttgtggataaagaattattagagcctggctgttctgtccttttacatcataaaactatgtctattgtgggtgttctacaagatgatgccgatccaatggtttctgtaatgaaaatggacaagtctccaactgagtcgtatagtgatattggtggtttggaatcacagatccaagaaattaaggaagccgtagaattaccattaacacatccagaattatatgaagaaatgggtataaaaccacctaaaggtgttatattatatggtgccccaggtactggtaagacattattggcaaaagcagttgctaatcaaacatcggccacattcttgagaatcgtaggttctgaattaatacaaaaatatctcggtgacggtccaagattgtgtagacagatttttaaagtggcggctgaaaatgcaccaagtatcgttttcattgatgaaatcgatgctatcggtacaaaaagatatgattcaaatagtggtggtgaaagagaaatccaaagaactatgttagaattattaaaccaattggatggttttgatgatagaggtgatgttaaagttataatggcaacaaataaaatcgaaagtttagatcctgcattaattagaccaggtagaattgatcgtaagattctattcgaacaacctgatctacaaacaaagagaaaaattttaaccatacatacatcgaaaatgaatttgagcgaagatgttaatctagaacaattagtgacttcaaaagatgacctgtcaggtgctgatatccaagctatgtgtacagaagctggtttactagcattgagagaaagaagaatgcaagtcaccgcagaagatttcaaacaaggtaaagaacgtgtcttgaagaacaaggtcgaagaaaacctggaaggtttatacttatag

SEQ ID NO: 5489 - protein, 437 aa, Vanderwaltozyma polyspora DSM 70294
MGQGVSSGQDKKKKKDGNQKPKYEPPVQSKFGRKKRKHGPSTAEKLPNIYPNTRCKLKLLRMERIKDHLLLEEEFVTNSEILKPFEKKQEEEKKQLAEIRGNPLSIGTLEEIIDDDHAIVTSPTMPDYYVSILSFVDKELLEPGCSVLLHHKTMSIVGVLQDDADPMVSVMKMDKSPTESYSDIGGLESQIQEIKEAVELPLTHPELYEEMGIKPPKGVILYGAPGTGKTLLAKAVANQTSATFLRIVGSELIQKYLGDGPRLCRQIFKVAAENAPSIVFIDEIDAIGTKRYDSNSGGEREIQRTMLELLNQLDGFDDRGDVKVIMATNKIESLDPALIRPGRIDRKILFEQPDLQTKRKILTIHTSKMNLSEDVNLEQLVTSKDDLSGADIQAMCTEAGLLALRERRMQVTAEDFKQGKERVLKNKVEENLEGLYL

SEQ ID NO: 5490 - DNA, 1287 bp, Vanderwaltozyma polyspora DSM 70294
  CDS (1)..(1287)
atggaagaattaggtattagcagcgctggtgtagaagttgccgaagaaaaacctctgatgaaatcatatgggtctcttttggctcaattaggacaacaacaaagtggaaatggattgatcagtgggaataatagtgatgtctacttgaaattaaagaaattagaaaaagaatacgaattgttgactttacaagaagaatatatcaaggatgaacaacgtcatttgaagcgagaattattaagagctcaagaagaagttaaaagaattcaatcggttccattagttatcggacaatttttagaaccaattgatcaaaatactggtatcgtgtcttctactacaggtatgagttatgtagtgagaattttgtctacattggatcgtgaattattgaaaccttccatgtcagtagctttacatcgtcattcaaatgcattagttgatatattaccaccagattcagattcaagcatatctataatgggtgcaaacgaaaaacctgacgttacatacgcagatgtcggtggtttggatatgcaaaaacaagaaattagagaagctgtcgaattgccattggttcaagcagatttatacgaacaaattggtattgatccaccaagaggtgttttgctatatggtcctccaggtacaggtaagactatgttggtcaaagctgttgccaacagtacaaatgcttcatttattagagtcaatggttcggaatttgtacataaatacttaggtgaaggtcctagaatggtccgtgacgttttcagattggcaagagaaaatgcaccatcaatcattttcattgatgaagtcgattctattgccaccaaacgttttgatgcccaaacaggttcagatcgtgaagtacaaagaattttaatcgaactattgacacaaatggatggttttgatcaatcaacaaacgtaaaagtcatcatggccacaaatagagcggacacattagatcctgcattactaagacctggtagattagatagaaaaatcgaattcccatcattacgtgacagacgtgaacgtcgtttgattttcggtactattgcagccaagatgtcattggcaccagaagcagatttggattcattaattgtacgtaacgattcattgtcaggtgctacaattgcggcaatcatgcaagaagcgggtctacgtgccgtaaggaagaatagatatgtcattttacaaagtgatctagaagaagcatacgcagcccaagttaaaactgatacagatgtagataaatttgatttctacaaatga

SEQ ID NO: 5491 - protein, 428 aa, Vanderwaltozyma polyspora DSM 70294
MEELGISSAGVEVAEEKPLMKSYGSLLAQLGQQQSGNGLISGNNSDVYLKLKKLEKEYELLTLQEEYIKDEQRHLKRELLRAQEEVKRIQSVPLVIGQFLEPIDQNTGIVSSTTGMSYVVRILSTLDRELLKPSMSVALHRHSNALVDILPPDSDSSISIMGANEKPDVTYADVGGLDMQKQEIREAVELPLVQADLYEQIGIDPPRGVLLYGPPGTGKTMLVKAVANSTNASFIRVNGSEFVHKYLGEGPRMVRDVFRLARENAPSIIFIDEVDSIATKRFDAQTGSDREVQRILIELLTQMDGFDQSTNVKVIMATNRADTLDPALLRPGRLDRKIEFPSLRDRRERRLIFGTIAAKMSLAPEADLDSLIVRNDSLSGATIAAIMQEAGLRAVRKNRYVILQSDLEEAYAAQVKTDTDVDKFDFYK

SEQ ID NO: 5492 - DNA, 1383 bp, Aedes aegypti
  CDS (1)..(1383)
atgaaatcggaacttcttggcgagcgagttttttttacggcccacgacctgcaagctttgtggccgaactgtcaaacacatttattgttgtgtgaactcctgctgctgcaagtcatcatagttgttccagttgaaaagttcgcgaaaataatggctgaagtagaattattcgttgcggaaaaggacgagactgacgtccggccaatgaaagacacgacgttggatgaattggatatggaggacttgtatacaaaatataagaaattacaaaaaatgctggagtttttggaggttcaagaggagtacattaaagacgaacagcgtaatcttaaaaaggaatatctccatgcccaggaagaggtcaaacggatccaatcggtcccgttggtgatcggccaatttttggaagcggtcgatcaaaacaacggtattgtgggctcaactacaggatcgaattacttcgttcgaattttgtccacaatcgatcgagaactgttgaaaccttctgctagtgtggcactgcataagcatagcaacgctctggtggatgttctaccgccggaagctgatagctcgatttctatgcttcaagccgatgagaaaccggaagttcagtattcggatattggaggtatggatatgcagaaacaagaaattcgagaagccgtcgaactgccgcttacacactttgagttgtacaagcaaattggtattgatcccccgagaggtgtactgatgtacggaccacctggttgcggaaaaactatgttggccaaggctgtggctcatcatacaacagcagcctttattagagttgttggctccgagtttgtccagaaatatctgggcgaaggtcctcgtatggtgcgtgatgtattccgtttggcaaaagaaaattccccagctataattttcattgatgaaatcgacgcaattgccactaagcgtttcgatgctcaaactggcgctgacagggaagtgcaacgtatcctactggaattattgaatcaaatggacggatttgatcaaacgaccaacgttaaagttatcatggctaccaatcgtgctgatacactagatcccgcactgctgcgtccaggacgtttggataggaaaatcgaatttcctttgcccgatcgtcgtcaaaaacgattaattttttcgaccatcactgcaaagatgaatctatccgaagacgttgatctggaagactacgttgctcggccggacaaaatatctggcgcggacatcaatgcaatttgtcaggaagctggcatgcacgctgtgcgcgaaaataggtacattgtcttggctaaagatttcgagaagggttataagaacaacatcaagaaagatgaaaccgaacacgagttctacaaatag

SEQ ID NO: 5493 - protein, 460 aa, Aedes aegypti
MKSELLGERVFFTAHDLQALWPNCQTHLLLCELLLLQVIIVVPVEKFAKIMAEVELFVAEKDETDVRPMKDTTLDELDMEDLYTKYKKLQKMLEFLEVQEEYIKDEQRNLKKEYLHAQEEVKRIQSVPLVIGQFLEAVDQNNGIVGSTTGSNYFVRILSTIDRELLKPSASVALHKHSNALVDVLPPEADSSISMLQADEKPEVQYSDIGGMDMQKQEIREAVELPLTHFELYKQIGIDPPRGVLMYGPPGCGKTMLAKAVAHHTTAAFIRVVGSEFVQKYLGEGPRMVRDVFRLAKENSPAIIFIDEIDAIATKRFDAQTGADREVQRILLELLNQMDGFDQTTNVKVIMATNRADTLDPALLRPGRLDRKIEFPLPDRRQKRLIFSTITAKMNLSEDVDLEDYVARPDKISGADINAICQEAGMHAVRENRYIVLAKDFEKGYKNNIKKDETEHEFYK

SEQ ID NO: 5494 - DNA, 1317 bp, Aedes aegypti
  CDS (1)..(1317)
atgggacaaaatcaatcagccggaggtggcggcgataaaaaggatgacaaagacaagaagaagaaatacgagcccccgattccgacgcgcgttggaaagaaaaagcggaagaacaagggtccggatgccgccatgaaattaccccaggtcactcctcatactcggtgtcgtttgaagttgttgaaattggagcgcatcaaggattatttgctgatggaggaggaattcattcgtaaccaggaacgactaaagccccaggatgaaaagaacgaagaggaacgttccaaagtcgatgatctgcgaggaacgccaatgtctgtgggcaacttggaggaaatcatagacgataatcatgcgattgtgtccacttccgtcggaagtgagcattacgttagcatcctgtctttcgttgataaagatcaattggaaccggggtgttcggtcttactgaatcataaggttcatgccgtggtcggagtgctgggagacgatactgacccgatggttaccgttatgaagctggagaaggctccccaggaaacgtatgccgatattggagggttagacactcagattcaagaaatcaaggaatccgtagagttgcctttgactcatcccgaatactacgaagaaatgggtataaaaccgccgaagggagttatcctctatggacctccaggaacgggtaaaacactactcgccaaggccgtggccaatcaaacttcagcgacatttttgcgagtggtcggatcggagttgatccagaagtacttgggtgatggacccaaactggttcgagaactattccgtgtcgctgaggaacatgctccttcaattgtcttcattgacgaaatcgatgcagtaggcacaaaacgttacgattctaattccggaggagaacgtgagatccagagaaccatgttggaactgctgaaccagctggacggtttcgattcacgcggggatgtgaaggttattatggcaaccaatcgcattgaaactctcgatccagctttgattcgtcctggtcgtattgatcgcaagattgagttcccacttccggacgagaaaaccaagcgtcgtatttttaacattcacaccgcccgtatgacgttggcagatgatgtgaacctttccgagctgattatggccaaggatgacctttccggggccgacatcaaagccatctgcactgaagcgggtctgatggctttacgtgagcgccgtatgaaagtgacgaacgaagactttaaaaaatccaaggaaagtgtcctttaccgcaagaaggaaggaactcccgaaggattgtatctctag

SEQ ID NO: 5495 - protein, 438 aa, Aedes aegypti
MGQNQSAGGGGDKKDDKDKKKKYEPPIPTRVGKKKRKNKGPDAAMKLPQVTPHTRCRLKLLKLERIKDYLLMEEEFIRNQERLKPQDEKNEEERSKVDDLRGTPMSVGNLEEIIDDNHAIVSTSVGSEHYVSILSFVDKDQLEPGCSVLLNHKVHAVVGVLGDDTDPMVTVMKLEKAPQETYADIGGLDTQIQEIKESVELPLTHPEYYEEMGIKPPKGVILYGPPGTGKTLLAKAVANQTSATFLRVVGSELIQKYLGDGPKLVRELFRVAEEHAPSIVFIDEIDAVGTKRYDSNSGGEREIQRTMLELLNQLDGFDSRGDVKVIMATNRIETLDPALIRPGRIDRKIEFPLPDEKTKRRIFNIHTARMTLADDVNLSELIMAKDDLSGADIKAICTEAGLMALRERRMKVTNEDFKKSKESVLYRKKEGTPEGLYL

SEQ ID NO: 5496 - DNA, 1254 bp, Caenorhabditis briggsae AF16
  CDS (1)..(1254)
atgtccgtcgcagctctccgagaaatcggaatcacggccacggctccagaaacgccaccaccggtcgccgtccctccaccacttccaacgtcttctgtggatgtttcttctgatgattacataaaactgacctccctggagacccaattggcacatcttcaggttatggaggattatatcaagttggaaacaagaaatctcgagaaagagttgctccatgcacaggaagaagtgaaacgtattcaatcggttccactggttatcggacaatttttggaagccgttgatcagaatcatgccatcgttggtagcaccacgggatccaattattatgtccgcgttctttcgattttggatcgagaacttttgaagcccggatgctcggtggctcttcataaatattcgaatgcgcttgtcgacgttcttcctccagaagcagacagctcgatccaaatgcttcgtccagatgagaaaccagacgtttcttatggagatatcggaggtttggatatgcaaaagcaggaggttcgtgaggctgttgagcttccactcacccatggagaactctatcaacaaattggaattgatcctccaagaggagttttgatgtacggaccaccgggatgtggaaagacaatgttggcgaaggcggttgctgcgaatacggctgcgtcttttattcgtgtcgttggatcggaatttgtgcagaagtatttgggagaagggccccgtatggttcgtgatgttttccgtctggctaaggagaacagtccatcgattatcttcatcgacgaaatcgatgcgatcgccacaaaacgtttcgatgctcaaactggagctgatcgtgaggtccaacgtatccttctcgagttgctcaaccaaatggacggattcgatcaaagcacgaatgtcaaagtgatcatggccacaaatcgtcaagatacccttgatcccgcccttctccgacccggacgtctcgatcgtaaaatcgaattcccacttccggatcgtcgtcagaagcgtctcgtcttcactaccatctgctctcgtatgaatctgtctgatgacgtggatttggaagattgggttgctcgtccggacaagatttccggtgctgacatcaactcgatttgtcaggaagccggtatgcaggcagtacgtgagaatcgctatgtggttctgaccaaggatctggagaaggcctacaaaaatgtcgtcaagaaggacaccaacgattttgagttctacaagtaa

SEQ ID NO: 5497 - protein, 417 aa, Caenorhabditis briggsae AF16
MSVAALREIGITATAPETPPPVAVPPPLPTSSVDVSSDDYIKLTSLETQLAHLQVMEDYIKLETRNLEKELLHAQEEVKRIQSVPLVIGQFLEAVDQNHAIVGSTTGSNYYVRVLSILDRELLKPGCSVALHKYSNALVDVLPPEADSSIQMLRPDEKPDVSYGDIGGLDMQKQEVREAVELPLTHGELYQQIGIDPPRGVLMYGPPGCGKTMLAKAVAANTAASFIRVVGSEFVQKYLGEGPRMVRDVFRLAKENSPSIIFIDEIDAIATKRFDAQTGADREVQRILLELLNQMDGFDQSTNVKVIMATNRQDTLDPALLRPGRLDRKIEFPLPDRRQKRLVFTTICSRMNLSDDVDLEDWVARPDKISGADINSICQEAGMQAVRENRYVVLTKDLEKAYKNVVKKDTNDFEFYK

SEQ ID NO: 5498 - DNA, 1332 bp, Caenorhabditis briggsae AF16
  CDS (1)..(1332)
atgggacagcaacagtctggcttcggaggaagaggtaacgaccggggatccggtgataacgaaaagaaagaaaagaagaagtatgaggctccaattccatcaagaatcggaaaaaagaagaagggatctaaaggaccagatgccgcaagcaaattgccagcagttaccccacacgccagatgccgtctgaagttgttgaaaagtgagagaatcaaggattacttgctgatggagcaggaattcatccaaaaccaagagcgtctgaagccacaagaggagagacaggaggaagaacgtgctaaggttgatgagcttcgtggaactccaatggctgttggatcattggaagaaattattgatgatcaacatgctattgtttctactaacgtcggaagtgagcattatgtcaacatcatgtcattcgtagacaaggaacagttggaaccaggatgctctgtacttctcaaccacaaaaatcatgcagttatcggagtactttccgatgacactgacccaatggtatctgttatgaaactcgagaaagccccacaggaaacctacgcagatgttggaggactcgatcaacaaattcaagaaatcaaagaagctgttgaattgcctcttacccatcctgaatactatgaagaaatgggtattcggccgccaaagggagttatcctctacggttgccctggtactggaaagacccttctagcgaaagccgtagcgaatcaaacatcagcaactttcctccgtattgttggatcagagcttatccagaaatacctcggagacggaccaaaaatggttcgtgagcttttccgcgtcgccgaggaaaatgcaccatcaatcgtcttcatcgacgaaatcgacgctgttggaacgaagcgttacgattccaactctggaggagaacgggaaattcaacgtaccatgcttgagcttctaaatcagctagacggattcgactctcgtggagacgtgaaagtgctcatggctacaaaccgtatcgagtctctcgaccctgcattgatccgtccaggacgtattgatcgtaaaatcgagttcccattgccagatgagaaaaccaagcgccgcatcttccagattcacacatcacgcatgacccttggagacgatgtgaacctcgaagaattcatcactgctaaggatgagttgagtggtgctgacatcaaggcaatgtgtacagaagctggtctcctggctctccgtgaacgtcgaatgcgtgtgaccatggaggatttccagaagtccaaagaaaatgtcctttaccgcaagaaggaaggagcccccgaagagctctacttgtaa

SEQ ID NO: 5499 - protein, 443 aa, Caenorhabditis briggsae AF16
MGQQQSGFGGRGNDRGSGDNEKKEKKKYEAPIPSRIGKKKKGSKGPDAASKLPAVTPHARCRLKLLKSERIKDYLLMEQEFIQNQERLKPQEERQEEERAKVDELRGTPMAVGSLEEIIDDQHAIVSTNVGSEHYVNIMSFVDKEQLEPGCSVLLNHKNHAVIGVLSDDTDPMVSVMKLEKAPQETYADVGGLDQQIQEIKEAVELPLTHPEYYEEMGIRPPKGVILYGCPGTGKTLLAKAVANQTSATFLRIVGSELIQKYLGDGPKMVRELFRVAEENAPSIVFIDEIDAVGTKRYDSNSGGEREIQRTMLELLNQLDGFDSRGDVKVLMATNRIESLDPALIRPGRIDRKIEFPLPDEKTKRRIFQIHTSRMTLGDDVNLEEFITAKDELSGADIKAMCTEAGLLALRERRMRVTMEDFQKSKENVLYRKKEGAPEELYL

SEQ ID NO: 5500 - DNA, 1236 bp, Caenorhabditis briggsae AF16
  CDS (1)..(1236)
atgtcactcgctgcgttggctgaacttggcatcgtgccggagccggaactctgcgctcctccgccacaacatcttctcatcgacaacacgaacgatgactgcatcaagcttactcgcctacaaactcatcttgcacatctccaagtgatggaagattacatcaagctcgaaaccagaaatctcgagaaagaacttctccacgcgcaggaagaagtaaaacgtattcaagccgttcccctcgtcatcggtcaatttttggaggctgttgacaacgagcatgctatcgtcggtagcaccaccggctccaactactttgtccgagtgctttcgactcttgatcgcgaacttctcaagccaggatgttccgtttctcttcacaaatactcgaatgccttggtagatgtgctgccaccagaagccgatagctctattcaaatgcttcgtcctgacgagaagccgaacgtcgcttattcggatattggaggacttgatatgcagaagcaagaggttcgtgaagccgtcgagcttccgttgactcatggagaactttaccaacaaattggaattgaccctccacgtggagttctcatgtacggaccaccaggatgcggaaagaccatgttggctaaagcagtcgccgccaacactgctgcttcgttcattcgggtcgtcggttcggaatttgtgcagaagtatctcggagaaggaccacgaatggtgcgagatgtcttcagactggctaaagaaaacagcccatctatcatcttcatcgatgagattgatgccatcgcaacgaaacgtttcgacgctcaaacaggagctgatcgtgaagtccaacgtatccttctcgagttgcttaatcaaatggatggtttcgatcaaagcaccaacatcaaagtaatcatggccaccaacagacaagacaccttggatcccgctcttctccgtccaggacgtctcgatcgtaagatcgagttcccacttccggatcgtcgtcaaaagcgtctcgtcttctcgaccgtttgtgctcgaatgaatctctctgatgacgttgatttggaagattgggtggctcgtccagacaagatttctggtgctgacatcaacgccatctgccaggaggcaggaatgcaagcagttcgcgagaatcgctacgttgtgctcacaaaggatctggagaaagcctataaaaatgtcgtcaagaaggacaccaacgaatttgagttctacaagtaa

SEQ ID NO: 5501 - protein, 411 aa, Caenorhabditis briggsae AF16
MSLAALAELGIVPEPELCAPPPQHLLIDNTNDDCIKLTRLQTHLAHLQVMEDYIKLETRNLEKELLHAQEEVKRIQAVPLVIGQFLEAVDNEHAIVGSTTGSNYFVRVLSTLDRELLKPGCSVSLHKYSNALVDVLPPEADSSIQMLRPDEKPNVAYSDIGGLDMQKQEVREAVELPLTHGELYQQIGIDPPRGVLMYGPPGCGKTMLAKAVAANTAASFIRVVGSEFVQKYLGEGPRMVRDVFRLAKENSPSIIFIDEIDAIATKRFDAQTGADREVQRILLELLNQMDGFDQSTNIKVIMATNRQDTLDPALLRPGRLDRKIEFPLPDRRQKRLVFSTVCARMNLSDDVDLEDWVARPDKISGADINAICQEAGMQAVRENRYVVLTKDLEKAYKNVVKKDTNEFEFYK

SEQ ID NO: 5502 - DNA, 1539 bp, Malassezia globosa CBS 7966
  CDS (1)..(1539)
atgcgccctgtaccatggcttcatcgcgcctctaacccgttggaattcaatgaaaacgtgaatctcgagtggagtggagcacaaatgcgccatggttggtcacgtgaaggtgcactctcttgtgcacacacgcacacatccgaaggggacacgcgtcagtcaatccagcatcctttgagccactacgtcaatagcgacatgggacaaatacccagtggtaacgctgctggacgtggacaaaagaaagatacgaacaagaaaaaagagccgaagaaatgggaacctcctgtgcctacacgcattgggaagaagaaaaagaagcactctgattcagcagcaaagctaccggcggtttatcctacgacacgttgtcgactaaaactcctgaaaatggagcgtattaaagaccacttgctactagaagaagagtttgttatgaaccaagatcgactccgcccgaaagatgatcatgacgaagaagaacgtacacgcgttgacgatttgcgtggtagtcccatggccgttggcacactggaagagattattgacgacgaacatgtcatcgttagcagctcaaccggtcctgaatattatgtgagtatcatgagctttgtcgacaaagatttgctggaacctggatgcagtgtcctgcttcatcacaaaactatggctgttgtcggtgtgctgtccgaggacactgatccaagtgtgaacataatgaaactagataaagcgccgtcagagagctacgcagacgttggcggtctcgaatctcagatccaggaaatcaaagagtctgtcgaattgccgcttactcacccggaactatatgaagagatgggcattcgaccgcccaaaggtgtcattctctatggtgtgcctggtacgggtaaaacgcttttggccaaagctgtagccaatcagacatctgcgacgttccttcgtgtcgttggctctgaactgatccaaaaataccttggtgatggtcccaagcttgttcgcgagctcttccgtgtcgcagatgagcacgcgcccagtatcgtgttcattgacgaagtggatgccgtgggttcaaagcgatatgactcgtcatctggtggcgaacgtgaaattcagcgcacgctattggaactccttaaccagctggacggttttgactctcgccatgatgttaaagtgattatggctaccaacaagatcgaaagccttgatccagctttaatccgccctggtcgtattgaccgcaaaatcgagtttcccttgcccgatcagaaaaccaagatgcagattttccgcttgcatacttctcgtatgaaccttgatcctgacgtcaacttggaagaatttgtcgcaatgaaggacgatttgagcggtgctgatatacgaagtttgaccaccgaggctggtcttctagcactgcgtgagcgccgaatgcgcgtcaccaagaaagacttcatcactgcacgcgagcgtgtgatagaccgaaagaatgaaggcacgcccgatgtcttcatctttcgtctcacgcctgagaaatag

SEQ ID NO: 5503 - protein, 512 aa, Malassezia globosa CBS 7966
MRPVPWLHRASNPLEFNENVNLEWSGAQMRHGWSREGALSCAHTHTSEGDTRQSIQHPLSHYVNSDMGQIPSGNAAGRGQKKDTNKKKEPKKWEPPVPTRIGKKKKKHSDSAAKLPAVYPTTRCRLKLLKMERIKDHLLLEEEFVMNQDRLRPKDDHDEEERTRVDDLRGSPMAVGTLEEIIDDEHVIVSSSTGPEYYVSIMSFVDKDLLEPGCSVLLHHKTMAVVGVLSEDTDPSVNIMKLDKAPSESYADVGGLESQIQEIKESVELPLTHPELYEEMGIRPPKGVILYGVPGTGKTLLAKAVANQTSATFLRVVGSELIQKYLGDGPKLVRELFRVADEHAPSIVFIDEVDAVGSKRYDSSSGGEREIQRTLLELLNQLDGFDSRHDVKVIMATNKIESLDPALIRPGRIDRKIEFPLPDQKTKMQIFRLHTSRMNLDPDVNLEEFVAMKDDLSGADIRSLTTEAGLLALRERRMRVTKKDFITARERVIDRKNEGTPDVFIFRLTPEK

SEQ ID NO: 5504 - DNA, 1218 bp, Malassezia globosa CBS 7966
  CDS (1)..(1218)
atggaagaaatcggcattgcgccaactgccacgcaggcatctggatcaaatacacgatccataaaaaatggagatgtatatcttcaatacaagaaacttcagcaacagctcgagtttctgaatacgatggaagactacgtgaaagatgagcagcgcaacctgaagcgtgagcttgtacgcgcacaagaagaggtgaagcgaatccagtccgtgcctctggtgatcggacagtttctcgagcccattgaccagatgacaggcatcgttggctctactacaggatcaaactatgtggtgcgcatattatctacaatcgatcgtgagctgctacgtcctggcagcagtgttgcactgcatcgccactcaaactcgcttgtggaagtcctaccgccagagtcagactctagcatcgtgatgatgagccagtcagaaaggcccaccgagacgtatcaggatattggtggtcttgatgtgcaaaagcaagagattcgcgaagctgttgagcttccccttgtccaggctgatctataccaccaaatcggtattgatccaccgcgtggtgttcttttgtatggcccgccaggaacaggcaagacaatgcttgtcaaggccgttgcaaacgctacgacagcatcatttattcgggttgtcgggtccgagtttgtgcagaaataccttggtgaaggcccccgcatggtccgtgacgtgttccgtcttgcgcgtgagaatgccccgtcgattatctttattgatgaaattgatgccatcgcaacgaagcgtttcgatgcacagacaggtgctgaccgagaagtgcagcgtattttgctggagctccttactcagatggatggcttcgatcaaggcagtaacgtcaaagtcatcatggccacgaatcgtgcagacacacttgatccagctctgctccgtcccggtcgtcttgaccgcaagatcgagttcccgcttcccaaccgtcgcgagaagcgtctcattttccaaacgatctgtggccgcatgaacctgagccctgacgtcgatctagaagactatgtgagtcgtcctgacaaactatcgtgcgcggagattgcttctgtgtgccaagccgcaggtatgcaggccgtgcgtaaaaaccgatacgtcgtcctgcctgctgactttgacgaggcattcaagcagatgtcgaaaaagcacgacgataacaagttagacttttaccagtag

SEQ ID NO: 5505 - protein, 405 aa, Malassezia globosa CBS 7966
MEEIGIAPTATQASGSNTRSIKNGDVYLQYKKLQQQLEFLNTMEDYVKDEQRNLKRELVRAQEEVKRIQSVPLVIGQFLEPIDQMTGIVGSTTGSNYVVRILSTIDRELLRPGSSVALHRHSNSLVEVLPPESDSSIVMMSQSERPTETYQDIGGLDVQKQEIREAVELPLVQADLYHQIGIDPPRGVLLYGPPGTGKTMLVKAVANATTASFIRVVGSEFVQKYLGEGPRMVRDVFRLARENAPSIIFIDEIDAIATKRFDAQTGADREVQRILLELLTQMDGFDQGSNVKVIMATNRADTLDPALLRPGRLDRKIEFPLPNRREKRLIFQTICGRMNLSPDVDLEDYVSRPDKLSCAEIASVCQAAGMQAVRKNRYVVLPADFDEAFKQMSKKHDDNKLDFYQ

SEQ ID NO: 5506 - DNA, 1434 bp, Phaeosphaeria nodorum SN15
  CDS (1)..(1434)
atgaacaccgtcaacacgacaaacacgaccgccaccgcagcaccccatcgctcatctctgcatgctggaggcggcggccctcccggcgatgacaagaacaagaaggacaagaaggataagccaaagtacgagccaccaccacagcccacgacccgcatcggcaggaagaagaagaaggctgccggacccagcgccgccgccaagctccccattgtctacccgaccgcacgatgcaagctgaggtatctgcgtatgcagcgcatccacgaccacctgctgctggaggaggagtacgtcgagaaccaggagcggctacggaaggcgaaggcggtcaaggagggcaacgcgcccgtgccccagggtggagaggatgccgcggaccgcaacgctgacgagcgatcgcgggtggacgacatgcgaggcagccccatgggcgtcggcaacctcgaggagctgatcgacgacgaccacgccatcgtgtccagtgccaccggccccgagtactacgtctccatcatgtctttcgtcgacaaggacctgctcgagccaggagccagcattctactacatcataagtcggtgtcggtcgtaggtgtgctcacagacgatgcggatcctctggtgtcagtcatgaagcttgacaaggcgccgactgagtcgtatgcggatattggtggtctggagcagcagattcaggaagtacgagaggcggtcgagctgccactgctgcatccggagctgtacgaggagatgggtatcaagccgccgaagggtgtcattctctacggtgcgcctggtaccggaaagactctcctggcaaaggccgtggccaaccagaccagcgccacgttcctgcgtatcgtcggtagcgagctgattcagaagtacctcggagacggccccaggttagtccgacagctgttccagaccgccgcggagaacgctccctccatcgtcttcatcgacgagatcgacgccattggtaccaagcgttacgagtcaacgtcaggaggtgagcgcgagattcaacgaaccatgttggagcttctcaaccagcttgacggtttcgacgatcgtggtgacgtcaaggtcatcatggccaccaacaagatcgagacactcgaccctgccctgattcgacctggtcgtattgaccgaaagattctcttcgagaaccccgatcaatcaaccaagaagaagatttttaccctgcacacctccaagatgtctttgaacgaggacgtcgacctagacgagttcatcaaccagaaggacgatctctccggtgccgatatcaaggccatctgttccgaggccggtctcttggctctacgtgagcgaagaatgcgcgtcaacatggaggatttccgcgctgcaagggagcgagtcctgaagacgaagagcgaaggtgaacccgagggtctatacttgtag

SEQ ID NO: 5507 - protein, 477 aa, Phaeosphaeria nodorum SN15
MNTVNTTNTTATAAPHRSSLHAGGGGPPGDDKNKKDKKDKPKYEPPPQPTTRIGRKKKKAAGPSAAAKLPIVYPTARCKLRYLRMQRIHDHLLLEEEYVENQERLRKAKAVKEGNAPVPQGGEDAADRNADERSRVDDMRGSPMGVGNLEELIDDDHAIVSSATGPEYYVSIMSFVDKDLLEPGASILLHHKSVSVVGVLTDDADPLVSVMKLDKAPTESYADIGGLEQQIQEVREAVELPLLHPELYEEMGIKPPKGVILYGAPGTGKTLLAKAVANQTSATFLRIVGSELIQKYLGDGPRLVRQLFQTAAENAPSIVFIDEIDAIGTKRYESTSGGEREIQRTMLELLNQLDGFDDRGDVKVIMATNKIETLDPALIRPGRIDRKILFENPDQSTKKKIFTLHTSKMSLNEDVDLDEFINQKDDLSGADIKAICSEAGLLALRERRMRVNMEDFRAARERVLKTKSEGEPEGLYL

SEQ ID NO: 5508 - DNA, 1266 bp, Phaeosphaeria nodorum SN15
  CDS (1)..(1266)
atggctgacgccgccgttgagaacccgtccaacaccgtcgcgccgcacaagaagcagctcccgtcatcgataccgaacttcgacactcttgaaggcttcacgacagatggcagcgatgactactccacatttaagaagctacaaaggcagctggagtacatccaccttcaggaagagtacatcaaggacgagcagcggagtctgaagcgcgagctcgtgcgagcacaggaggagatcaagcgtatccagagtgtgccgctggtgatagggcagttcatggaggcgatcgatcagaacaccggtatcgtacagtcttcaacaggctcaaactacgttgtccgcattctctcgaccctcgaccgcgaactgctgaagccctcctcatcggtagcactgcaccgtcactcaaatgcgctcgttgacatcctgcctcccgaggccgactcttcgattgccatgcttggccaggacgagaagcccgacgtcacatatgccgatgtaggaggtctggacatgcagaagcaggaaatcagagaagctgtcgagctaccgctcacgcacttcgacctgtacaagcagattggtatcgacccgccccgcggtgtgttgctgtacggacccccaggtacaggaaagactatgctggtcaaggctgtggcaaatagcactaccgcctccttcatccgagtggtgggctccgaattcgtccaaaagtatcttggtgagggaccccgtatggtccgtgacgtcttccgaatggcgcgcgagaactccccgtgtatcatcttcatcgacgagatcgatgctatcgctacaaaacgtttcgatgcacagaccggtgccgatcgagaagtccagcgtatccttcttgagctgctcaaccaaatggacggtttcgaccaaacttccaacgtcaaggtcatcatggccaccaaccgcgccgataccctcgaccccgcgctcctccgacccggtcgtcttgacaggaagatcgagttcccgtctctccgtgatcgccgtgagcgacgtctcattttctcaaccatcgccagtaagatgagtctttcgccagaggtagatctcgacagtctgatcgtgcgcaacgacccgctatccggtgcaattattgcagctatcatgcaagaggcaggtttgagggcggtacggaagaacaggtacaacatcatccaggcggatctggaggaggcatacacgagccaagtgaagggaaccaccgaggcggacaagttcgacttttacaagtga

SEQ ID NO: 5509 - protein, 421 aa, Phaeosphaeria nodorum SN15
MADAAVENPSNTVAPHKKQLPSSIPNFDTLEGFTTDGSDDYSTFKKLQRQLEYIHLQEEYIKDEQRSLKRELVRAQEEIKRIQSVPLVIGQFMEAIDQNTGIVQSSTGSNYVVRILSTLDRELLKPSSSVALHRHSNALVDILPPEADSSIAMLGQDEKPDVTYADVGGLDMQKQEIREAVELPLTHFDLYKQIGIDPPRGVLLYGPPGTGKTMLVKAVANSTTASFIRVVGSEFVQKYLGEGPRMVRDVFRMARENSPCIIFIDEIDAIATKRFDAQTGADREVQRILLELLNQMDGFDQTSNVKVIMATNRADTLDPALLRPGRLDRKIEFPSLRDRRERRLIFSTIASKMSLSPEVDLDSLIVRNDPLSGAIIAAIMQEAGLRAVRKNRYNIIQADLEEAYTSQVKGTTEADKFDFYK

SEQ ID NO: 5510 - DNA, 1182 bp, Aspergillus oryzae RIB40
  CDS (1)..(1182)
atgaacggcgctgctgacccggagagagagcaggcgctcgaggactacaagaagagcctgctggagctccgagaatgggaggccaagctcaaatcgctccggatgggaatcaaggatttgcaaagagagtttgatatatcagaggaaaacattaaggctctacagagtgtgggccagatcatcggtgaagtgttgaagcagctggatgaggagagattcattgttaaggcatcatccggtccccgttatgtcgtcggttgccgttcgaaggtcgataagtcgaaactgaaacaagggactcgtgtcgctctcgatatgacaaccctgactatcatgaggatgctgccacgggaggttgatccattagtatacaacatgtctttggaggacccgggacaagtcaacttcgctggtattggtggcttgaacgaacaaatccgagagttacgagaagtgatcgagttgccgctcaaaaatcccgagcttttccaccgagttggtattaagccacccaagggtgtcctcctttatggacctcctggtacaggaaagacactgctggcacgagccgtggcaagctctatggagaccaactttttgaaggttgtctcgtctgccatcgtcgacaagtacatcggtgaatctgcacggttaataagagagatgttcgggtacgccaaggagcatgagccttgtattatcttcatggatgaaatcgatgctattggtggtcgacgattctctgagggtacatccgctgaccgtgaaatccaacggacattgatggagcttcttaaccaattggatggcttcgattaccttggaaagacgaagatcatcatggctacgaacagacctgatactcttgatcccgctctgttgcgagcgggtcgtttggaccgcaagattgagattcctctgcccaatgaagttggtcgtttggagatcttgaagatccactctagtactgtccaactcgagggtgatatagactttgagagcgtcgtgaagatgagcgacggtcttaacggagcagatctgcgcaatgttgtcacggaagctggtttgtttgccattaaggactaccgagacgctattaaccaagatgacttcaaccgggcggtgcgcaaggtggcggaagctaagaagctggaaggcaagctggagtaccagaagctttag

SEQ ID NO: 5511 - protein, 393 aa, Aspergillus oryzae RIB40
MNGAADPEREQALEDYKKSLLELREWEAKLKSLRMGIKDLQREFDISEENIKALQSVGQIIGEVLKQLDEERFIVKASSGPRYVVGCRSKVDKSKLKQGTRVALDMTTLTIMRMLPREVDPLVYNMSLEDPGQVNFAGIGGLNEQIRELREVIELPLKNPELFHRVGIKPPKGVLLYGPPGTGKTLLARAVASSMETNFLKVVSSAIVDKYIGESARLIREMFGYAKEHEPCIIFMDEIDAIGGRRFSEGTSADREIQRTLMELLNQLDGFDYLGKTKIIMATNRPDTLDPALLRAGRLDRKIEIPLPNEVGRLEILKIHSSTVQLEGDIDFESVVKMSDGLNGADLRNVVTEAGLFAIKDYRDAINQDDFNRAVRKVAEAKKLEGKLEYQKL

SEQ ID NO: 5512 - DNA, 1245 bp, Aspergillus oryzae RIB40
  CDS (1)..(1245)
atgggagacgtcgccgtggagaatccggcgaacaacgtcacgcctcataccaagccggcaccattggacaccatccccaacatagactcaatcgaaggcacagggactgatggaggcgacgaatatgctactttgaagaaactccagagacatttagagtatgttggaaacggaaagagcctgaaaagagaacttgttcgtgcacaggaagaaattaagcggatacaaagtgttcccttggttataggccagttcatggaggcgattgaccagaataccggaatcgtgcaatcgtcaaccggctcgaattatgtcgtccggattctatccacgctcgaccgcgagaagctcaaaccatcgtcctcggtcgctctccatcgccactccaacgcccttgtcgatatcctacctccagaggccgactcctccatcgctatgttaggcgaaaatgagaaaccagacgtcacgtatgccgatgttggtggacttgatatgcagaagcaggaaatccgcgaggcagtggaattgccattgacgcacttcgacctgtacaggcaaatcggtatcgatcctcctcgtggtgtcctgctatacggccctcccggaacaggtaagactatgctggtcaaggcggtggcgaatagcacaactgccagcttcatccgagtaaacggctccgagtttgtccagaagtacttgggtgaaggtcctcgcatggtccgtgatgtgttcaggatggcccgggagaatgcccccgctattatcttcatcgacgaaatcgacgccattgccacaaagcgtttcgacgcccaaactggtgccgatcgtgaggttcaacgtattcttctggaactcctcaaccagatggatggttttgagcaatcgagcaatgttaaggtcattatggctactaaccgggccgatactttggatcctgctctgctgcgtccaggtcgtctggaccgaaagatcgagttcccctctcttcgtgatcggcgagagcgtcggttgattttcaccaccatcgcatctaagatgtccttgtcccctgaggtcgaccttgactcgctgattgtgcgtaatgaacccttgtctggtgctgtcattgccgccatcatgcaggaggctggtctacgagccgtgcggaagaaccggtacaacattatccaatctgaccttgaggatgcttacgctgcccaagtgaagactggacaagaagcggacaggcttgagttctaccggtaa

SEQ ID NO: 5513 - protein, 414 aa, Aspergillus oryzae RIB40
MGDVAVENPANNVTPHTKPAPLDTIPNIDSIEGTGTDGGDEYATLKKLQRHLEYVGNGKSLKRELVRAQEEIKRIQSVPLVIGQFMEAIDQNTGIVQSSTGSNYVVRILSTLDREKLKPSSSVALHRHSNALVDILPPEADSSIAMLGENEKPDVTYADVGGLDMQKQEIREAVELPLTHFDLYRQIGIDPPRGVLLYGPPGTGKTMLVKAVANSTTASFIRVNGSEFVQKYLGEGPRMVRDVFRMARENAPAIIFIDEIDAIATKRFDAQTGADREVQRILLELLNQMDGFEQSSNVKVIMATNRADTLDPALLRPGRLDRKIEFPSLRDRRERRLIFTTIASKMSLSPEVDLDSLIVRNEPLSGAVIAAIMQEAGLRAVRKNRYNIIQSDLEDAYAAQVKTGQEADRLEFYR

SEQ ID NO: 5514 - DNA, 1389 bp, Aspergillus oryzae RIB40
  CDS (1)..(1389)
atgggtaaccagcagtccaacatcggcggaggccccgggggcgatggaagggatgataaggataagaaggacaagcccagatacgaaccacctcctcctcccacgactcgtcttggacgtaagaagcgcaaggctgccggcccaagtacagcttccaaactccccgacatcttcccaacgtcacgatgcaaattacgatacttgcgaatgcaacgggtccacgatcacttgctgctagaagaagaatatgtcgagaatatggaacgtctacgcaaaactaaggcacaggcagcacatgattccgtcagcagaagcgagtttgatattatggaccgaaatgcagacgagaggggtcgcgtcgatgacatgagaggtacccccatgggagtcggcaacttggaagagttaatcgacgacgaccatgccattgtttccagtgctaccggaccagagtactacgtttccatcatgtccttcgttgataaggacttgctggagcctggtgccagcattctgttacaccacaagtctgtctccgttgtcggtgtgctcaccgaggagtccgaccccctggtgtccgtgatgaagcttgacaaggcaccgacggagtcttatgcggatatcggtggtcttgagactcagatccaagaggttcgagaatccgtcgagcttccgctgctccaccctgagctgtatgaagagatgggtatcaagccccccaaaggtgtcattctctacggtgccccgggaaccggaaaaacgctgcttgccaaggcagtcgccaatcaaacaagtgccactttcctccggattgtcggcagtgaactgatccagaaatacctcggtgacggacctcgtttggtgcgacagattttccaggttgctgcggaacacgctccttccattgtcttcattgatgaaattgatgccatcggtacgaagcgttacgactcaacttcgggtggtgaacgagaaattcagcgtactatgcttgagcttcttaaccagttggacggtttcgatgaccgcggagatgtcaaggttatcatggccactaacaagattgaaacacttgaccctgctttgattcgtcctggtcgtattgatcgaaagattctcttcgaaaacccagaccaaaataccaagaagaagatcttcaccctgcatacatccaagatgtccctcggcgatgatgtcgatctcgacgagtttatcaaccagaaagacgatctttcaggtgcagatatccgagcaatctgtaccgaagccggtttgatggctttgagagaacgtcgtatgagagtgcaaatggaggatttccgctccgctagggaacgtattatgaagacgaagcaagacggaggccctgtggaaggcttgtacctgtag

SEQ ID NO: 5515 - protein, 462 aa, Aspergillus oryzae RIB40
MGNQQSNIGGGPGGDGRDDKDKKDKPRYEPPPPPTTRLGRKKRKAAGPSTASKLPDIFPTSRCKLRYLRMQRVHDHLLLEEEYVENMERLRKTKAQAAHDSVSRSEFDIMDRNADERGRVDDMRGTPMGVGNLEELIDDDHAIVSSATGPEYYVSIMSFVDKDLLEPGASILLHHKSVSVVGVLTEESDPLVSVMKLDKAPTESYADIGGLETQIQEVRESVELPLLHPELYEEMGIKPPKGVILYGAPGTGKTLLAKAVANQTSATFLRIVGSELIQKYLGDGPRLVRQIFQVAAEHAPSIVFIDEIDAIGTKRYDSTSGGEREIQRTMLELLNQLDGFDDRGDVKVIMATNKIETLDPALIRPGRIDRKILFENPDQNTKKKIFTLHTSKMSLGDDVDLDEFINQKDDLSGADIRAICTEAGLMALRERRMRVQMEDFRSARERIMKTKQDGGPVEGLYL

SEQ ID NO: 5516 - DNA, 1221 bp, Coprinopsis cinerea okayama7#130
  CDS (1)..(1221)
atggatgaaatcggtattgaacccacttttgagaataccgtccaggacaaggcgacattgtaccaggacctcgaggaggacttgtaccttcgctacaagaagctcgcgcgacaccttgaaatgctcgatattcaagagagctacatcaaagatgaacaggccaacctcaaacgcgaactcatccgtgcgcaggaggaagtcaagcgaatcaaatccgtacccttggttattggccaattcctggaaccaatcgaccagaacactggcatcgtcggctcaacaacgggatcgaactatgtcgtgcggatattgtccacgctagacagggaactcttgaagccttcgtcatctgtggctttgcatcgacattcgaacgcgcttgtggacatcttgcctccggaggctgattcgtcaattacgatgcttgggaaggaggagaagccggatgtgacttaccaggatgttggtggattggacatgcagaagcaggagattagggaagctgttgagcttccgttgacccatttcgatctatacaagaagattggtattgacccgccgagaggtgtattgctctacggtccaccaggaactggaaagactatgcttgtgaaagctgttgcccaccatacgacagcatccttcatccgcgttgttggtagtgaattcgtgcagaagtaccttggtgaaggtcctcgcatggttcgagacgtcttccggctggcacgagagaacgcaccttcaatcatctttattgacgaaattgatgctattgcaacgaaacgtttcgacgctcaaaccggtgccgatcgtgaagtgcagcgtattcttatcgaattgctgacacaaatggacggtttcgaccagggaagcaacgtcaaggttatcatggccaccaaccgagctgataccctggatcccgctctgcttcgaccaggtcgtctggaccgaaagattgaattccctcatcccaaccgacgagagaagcgacttatcttccaaactgtgacaagcaagatgaacctcagccccgacgttgatctggaagactatgtatcgcgtcccgaccgcatttcgtccgctgagattgcttccatcgtgcaagctgcgggtctgcaagccgtacggaagaatcggtacgtcattcttcccatcgactttgaggaagcgtggaaacaaacggtcaagcgcaccgacgacacccacgagttctatcggtag

SEQ ID NO: 5517 - protein, 406 aa, Coprinopsis cinerea okayama7#130
MDEIGIEPTFENTVQDKATLYQDLEEDLYLRYKKLARHLEMLDIQESYIKDEQANLKRELIRAQEEVKRIKSVPLVIGQFLEPIDQNTGIVGSTTGSNYVVRILSTLDRELLKPSSSVALHRHSNALVDILPPEADSSITMLGKEEKPDVTYQDVGGLDMQKQEIREAVELPLTHFDLYKKIGIDPPRGVLLYGPPGTGKTMLVKAVAHHTTASFIRVVGSEFVQKYLGEGPRMVRDVFRLARENAPSIIFIDEIDAIATKRFDAQTGADREVQRILIELLTQMDGFDQGSNVKVIMATNRADTLDPALLRPGRLDRKIEFPHPNRREKRLIFQTVTSKMNLSPDVDLEDYVSRPDRISSAEIASIVQAAGLQAVRKNRYVILPIDFEEAWKQTVKRTDDTHEFYR

SEQ ID NO: 5518 - DNA, 1230 bp, Culex quinquefasciatus
  CDS (1)..(1230)
atggccgaggtactgaatgtggacaaggacgagaccgagttccgcccctcgtcgaaggacactccgctggatgaggaatccatggaggatctgtacaccaagtacaagaagttgcagaagatgctcgagttcctcgaggtgcaggaagagtacatcaaggatgagcagcggaacctgaagaaggaatatctgcacgcccaggaggaggtcaaacggatccagtcggttccgctggtgatcggtcagttcctggaggccgtcgaccagaacaacggaatcgtcggatcgaccacgggatcgaactactttgtccggattctttccacgatcgaccgtgagctgctgaaaccttcggccagtgtggccctgcacaagcacagcaatgccctcgtcgatgtgctgccaccggaagcggacagctcaatctcgatgctgcaggcggacgaaaaaccggaagtccaatactcggacattggaggcatggacatgcaaaagcaggaaatccgcgaagccgtcgaacttccgctgacccactttgagctgtacaagcagatcggaatcgacccgccgcggggtgtcctcatgtacggtccgcccggctgtggcaagacgatgttggccaaggccgttgcccaccatacgacggccgccttcatccgcgtggtcggttcggagttcgtgcagaaatatctcggcgaaggaccccgaatggtgcgcgacgtgttccgtctggccaaggagaactcacccgcaatcatcttcatcgacgaaatcgacgccatcgccacgaagcgtttcgacgcccaaaccggtgccgatcgtgaagttcaacgtatcctgctcgagctgcttaaccagatggacggattcgatcagaccaccaacgtgaaggtcatcatggccaccaaccgtgccgacaccctggatccggccctgctccgaccgggtcgtctcgatcgtaaaattgaattcccccttcccgaccggcgtcagaagcgactgatcttttcgaccatcaccgccaagatgaacctctcggaggatgtcgatttggaggattatgtggcgaggccggacaagatttccggtgcggacattaacgccatctgccaggaggcgggaatgcacgcggtgcgcgagaaccggtatatcgtgctggccaaggactttgagaagggttacaagaataacatcaagaaggacgaaaccgagcacgagttttacaaataa

SEQ ID NO: 5519 - protein, 409 aa, Culex quinquefasciatus
MAEVLNVDKDETEFRPSSKDTPLDEESMEDLYTKYKKLQKMLEFLEVQEEYIKDEQRNLKKEYLHAQEEVKRIQSVPLVIGQFLEAVDQNNGIVGSTTGSNYFVRILSTIDRELLKPSASVALHKHSNALVDVLPPEADSSISMLQADEKPEVQYSDIGGMDMQKQEIREAVELPLTHFELYKQIGIDPPRGVLMYGPPGCGKTMLAKAVAHHTTAAFIRVVGSEFVQKYLGEGPRMVRDVFRLAKENSPAIIFIDEIDAIATKRFDAQTGADREVQRILLELLNQMDGFDQTTNVKVIMATNRADTLDPALLRPGRLDRKIEFPLPDRRQKRLIFSTITAKMNLSEDVDLEDYVARPDKISGADINAICQEAGMHAVRENRYIVLAKDFEKGYKNNIKKDETEHEFYK

SEQ ID NO: 5520 - DNA, 1317 bp, Culex quinquefasciatus
  CDS (1)..(1317)
atgggtcaaaatcagtccgccggcgggggtggcgacaagaaggatgacaaggacaagaagaaaaagtacgagcccccgattccgacccgggttggcaagaagaagcgcaaggccaagggaccggacgcggccatgaagctgccgcaggtcactccgcacacccggtgccggctgaagctgctgaagctggagcgcatcaaggactatctgctgatggaggaggagttcatccggaaccaggagcggctgaagccccaggacgagaagaacgaggaggaacggtccaaggtcgatgacctgcggggaactccgatgtcggtggggaacttggaggagattattgacgataatcacgcgatcgtgtcgacttcggtgggcagcgagcattacgtgagtattttgtcgtttgtggacaaagaccagctcgagccgggttgttccgtgctgctgaaccacaaagttcacgccgtggtgggtgttttgggggatgacaccgacccgatggtgacggtgatgaagctggagaaggcaccgcaggagacgtacgcggacattggtgggttggacacgcaaatccaggaaattaaggaatctgttgaacttccgctgacccatccggagtactacgaggagatgggaattaagcccccgaagggtgtcattctgtacggaccgccgggaaccgggaagaccctgctggcgaaggccgtggccaatcaaacgtcggcgacgttcctgcgagtggtcgggtcggaactgattcagaaatatctcggcgatggtccgaagctggttcgcgagttgttccgtgtggccgaggagcacgcgccgtcgattgtgtttatcgacgaaattgacgccgtcggaaccaaacggtacgattcgaattcgggtggcgagcgtgaaatccagcgaaccatgttggaactgctgaaccagctggacgggtttgattcgcgcggtgacgtcaaagtcatcatggccaccaaccgtatcgagacgctcgatccggccctgatccgtccgggacgaattgaccggaagattgagttccccctgcccgacgaaaagaccaagcggcgcatcttcaacatccacacggcgcggatgacgctggccgaggacgtgaacctgtcggagctgattatggccaaggacgatctgtccggggcggacatcaaggcgatctgtaccgaggcggggctgatggcactgcgcgagcgccgcatgaaggtcaccaacgaagactttaagaaatccaaggagagtgttctgtaccgcaagaaggagggcacccccgagggactatatctgtag

SEQ ID NO: 5521 - protein, 438 aa, Culex quinquefasciatus
MGQNQSAGGGGDKKDDKDKKKKYEPPIPTRVGKKKRKAKGPDAAMKLPQVTPHTRCRLKLLKLERIKDYLLMEEEFIRNQERLKPQDEKNEEERSKVDDLRGTPMSVGNLEEIIDDNHAIVSTSVGSEHYVSILSFVDKDQLEPGCSVLLNHKVHAVVGVLGDDTDPMVTVMKLEKAPQETYADIGGLDTQIQEIKESVELPLTHPEYYEEMGIKPPKGVILYGPPGTGKTLLAKAVANQTSATFLRVVGSELIQKYLGDGPKLVRELFRVAEEHAPSIVFIDEIDAVGTKRYDSNSGGEREIQRTMLELLNQLDGFDSRGDVKVIMATNRIETLDPALIRPGRIDRKIEFPLPDEKTKRRIFNIHTARMTLAEDVNLSELIMAKDDLSGADIKAICTEAGLMALRERRMKVTNEDFKKSKESVLYRKKEGTPEGLYL

SEQ ID NO: 5522 - DNA, 1470 bp, Laccaria bicolor S238N-H82
  CDS (1)..(1470)
atggatgaaataggtatcgaaatcacaagaaatgagccgacctttgagtccgtcgtgagcgagaaagctgcattctatcatgacctccatgaggaggaagacctttatctgaaatacaagaagctcgctcgccacctggaaatgcttgatatacaagaaaactacatcaaagacgagcaggccaacctcaagcgggaactcattcgggcccaagaggaggtgaagcgtattcaatccgtcccactggtcatcggtcaattcctggagcctatcgaccaacacaccggcattgtcgggtccactactggctcaaattacgtcgtccgaattttatcaactcttgaccgtgaactactcaaaccttcttcatccgtcgccctccaccgacattcaaacgccctcgtcgatattttgcctcccgaggccgactcctccattgccatgcttgggaaggaggagaaacctgatgtggcgtacgctgatgttggtgggatggatgcacaaaagcaggaaattcgggaggcggtggagctgcccctcacccatttcgacctgtacaagaagatcggcatcgacccaccccgtggtgttttgctctatggtccacctggtaccggcaagacaatgttggtaaaggcggtggcacatcatacaacagctgcgttcatccgcgtcgtgggtagcgagtttgttcaaaaatacttgggagagggcccgcgtatggtccgtgacgtctttcggctggcaagagagaactctcctgcaataatcttcatcgacgagattgatgctattgccacaaaacgattcgatgcacagacgggtgctgatcgtgaggtccaacgtattctgctagaactgttgaatcagatggatggttttgatcaaactagcaacgtaaaggttatcatggctacgaatcgagcggatacgctcgacccagcgctgctgcgacctggtcgtctagacagaaagattgaattccctcttccatcacggcgagaaaagcgattgatcttccaaactgtgaccaataaaatgaaccttggtccagacgtcgacctggaggattatgtttctcgaccagaccgactttcatcagcagaaattgcatccatagtgcaagctgctggtctacaagccgtgcggaagaatcgttatgtcattctgcctgtggactttgaggaggcgtggaaagtaagttgtttggatttgtttgcaacaatccacgtaactataaaaactcaacttttttcttgcatcacagcaaacagtcaaacggtcagacgagacacacgagttctatcggtagtttgcattttactgcgtctgtccgatcctgcacgaaggactggcgcccattcaaaggagcaatatgaacctcgtcctaccctttttcttgctcttcgcatgccgtatggcatcgccccatggttggacttttctgattatgcgggcatggagatttga

SEQ ID NO: 5523 - protein, 489 aa, Laccaria bicolor S238N-H82
MDEIGIEITRNEPTFESVVSEKAAFYHDLHEEEDLYLKYKKLARHLEMLDIQENYIKDEQANLKRELIRAQEEVKRIQSVPLVIGQFLEPIDQHTGIVGSTTGSNYVVRILSTLDRELLKPSSSVALHRHSNALVDILPPEADSSIAMLGKEEKPDVAYADVGGMDAQKQEIREAVELPLTHFDLYKKIGIDPPRGVLLYGPPGTGKTMLVKAVAHHTTAAFIRVVGSEFVQKYLGEGPRMVRDVFRLARENSPAIIFIDEIDAIATKRFDAQTGADREVQRILLELLNQMDGFDQTSNVKVIMATNRADTLDPALLRPGRLDRKIEFPLPSRREKRLIFQTVTNKMNLGPDVDLEDYVSRPDRLSSAEIASIVQAAGLQAVRKNRYVILPVDFEEAWKVSCLDLFATIHVTIKTQLFSCITANSQTVRRDTRVLSVVCILLRLSDPARRTGAHSKEQYEPRPTLFLALRMPYGIAPWLDFSDYAGMEI

SEQ ID NO: 5524 - DNA, 1350 bp, Laccaria bicolor S238N-H82
  CDS (1)..(1350)
atgggaaacgcacaatcaggcgcgaaccctcccgcggacaacaaccgaaacacagacaaggataaaggaaaggcccaacaacctcagaagaagaaatgggaacccccactgcccactcgagtcggaaaaaagaagagacgtggtccctctgcagcttcaaagcttccagctgtattccccacaacgcgatgccgtctcaagctacttaagatggagcgcatcaaggactatcttctccttgaggaggagtttgtgcagaatcaggagcggttgaagccggaggcgactcgtgaggagaagaatgaggaggatcggtcaagggtggatgatttgcgtggcagccccatggcggtaggaaccatggaagaaattatcgacgacgaccatgccattatcagcaccgcttctggccccgaacactacgtctctatcatgtcttacgtcgacaaggatctattagaacctggttgccaagtactccttcaccacaagacacaagctattgttggtgtcttgcaagacgacgctgaccccctggttagcatcatgaagctcgacaaagctccaacggaaagctatgcagatgtcggaggactcgagaatcagattcaggagattaaagaatctgtggagttgcctcttacacatcctgaactgtacgaagaaatgggtatcaaaccccccaaaggtgtcattttgtacggcgtccctggtacgggtaaaacactcctcgcgaaagcagtagcaaaccaaacgtctgcgactttccttcgtgtggtgggctcggagctcatccagaagtacctgggcgacggaccaaaacttgttcgcgagctgttcagggtagcagaggagcacgcaccaagtattgtattcatcgacgagattgatgccattggcacgaaacgatatgattcaacatcaggaggcgagcgcgaaattcaacgaacaatgttggaacttctcaaccagctggatggcttcgatactaggggagacgtcaaagttatcatggcgacaaatcgcattgattccctcgatcctgccctcatccgccctggccgcatcgacaggaagatcgagtttccgttgcccgatgtgaagacgaagcgacacatcttcaggctacatacgtcgcgtatgagtttgagtgaagatgtggatctggaagagttcatcttgacaaaagacgacctttctggggcggacatcaaggctgtttgcacggaggctgggttgcttgcgcttcgcgaacggcgaatgagggttacgaaagccgactttacttctgcgagggaaaaggtgttgtataggaagaacgaaggaacacctgagggcctgtatctgtaa

SEQ ID NO: 5525 - protein, 449 aa, Laccaria bicolor S238N-H82
MGNAQSGANPPADNNRNTDKDKGKAQQPQKKKWEPPLPTRVGKKKRRGPSAASKLPAVFPTTRCRLKLLKMERIKDYLLLEEEFVQNQERLKPEATREEKNEEDRSRVDDLRGSPMAVGTMEEIIDDDHAIISTASGPEHYVSIMSYVDKDLLEPGCQVLLHHKTQAIVGVLQDDADPLVSIMKLDKAPTESYADVGGLENQIQEIKESVELPLTHPELYEEMGIKPPKGVILYGVPGTGKTLLAKAVANQTSATFLRVVGSELIQKYLGDGPKLVRELFRVAEEHAPSIVFIDEIDAIGTKRYDSTSGGEREIQRTMLELLNQLDGFDTRGDVKVIMATNRIDSLDPALIRPGRIDRKIEFPLPDVKTKRHIFRLHTSRMSLSEDVDLEEFILTKDDLSGADIKAVCTEAGLLALRERRMRVTKADFTSAREKVLYRKNEGTPEGLYL

SEQ ID NO: 5526 - DNA, 1206 bp, Laccaria bicolor S238N-H82
  CDS (1)..(1206)
atggccaccgcaacacaagcacccattgcgcctggcggtgtcaagtcttactaccaggcgaaaattgaatctgcagagattctaatcaaccagaagactcagaacttacgacgactagaagcacaacggaatgctctcaacgcccgagttcggcttctgcgagaagaacttcaactactccacgaacctggaagttatgtcggtgaagtcatcaaagtaatgggaaagaacaaagtccttgtcaaagtacaacctgaagggaaatacatcgtcgatctggattcggaaatcgacatcaactcactcaaagcaacgctccgcgtcgccctccgttccgactcctacacaatccacaagatcctcccaaataaagtcgaccctctagtctcgctcatgatggttgagaaagtgccagatagcacatacgaaatggtcggcggtctcgaccaacaaatcaaggaaatcaaagaggtcatcgagctgcccgtcaaacatcccgaactcttcgaagccctgggtatcgcgcaacccaagggtgtcttgctttacggacccccgggtaccggcaagacgctcctcgcccgtgctgtagcccatcacaccgactgcaagttcatccgtgtgagcggaagcgagctggtgcaaaagtacattggagagggtagccgaatggtccgcgagctcttcgtgatggcacgagaacacgctcccagcatcatcttcatggacgagattgattccattggaagctcgagaggggagagtgggagtgggggaggtgattcggaggtgcagcggacgatgttggagttgcttaaccaactggatgggttcgagtcgacgaaaaatattaaagttatcatggctacgaatcgaattgatatcctggattccgcgctgctgcggccaggtcgtatcgatcgcaaaatcgagttcccacctccaggtcctgaggctcgcgtatccatccttcgcatccattcacgcaagatgtcgctgcaacggggcatcaacttgcgtgctcttgcagagaagatgggacagtgttctggagctgaagtccggggtatctgcacggaagctggtatgtacgccttgcgtgaacggagacaacatgtcacgcaggaagatttcgagtttgcggtggctaaggtcttgaggaaaaaccaagagggaaacacttcggtcaacaagcttttctcgtag

SEQ ID NO: 5527 - protein, 401 aa, Laccaria bicolor S238N-H82
MATATQAPIAPGGVKSYYQAKIESAEILINQKTQNLRRLEAQRNALNARVRLLREELQLLHEPGSYVGEVIKVMGKNKVLVKVQPEGKYIVDLDSEIDINSLKATLRVALRSDSYTIHKILPNKVDPLVSLMMVEKVPDSTYEMVGGLDQQIKEIKEVIELPVKHPELFEALGIAQPKGVLLYGPPGTGKTLLARAVAHHTDCKFIRVSGSELVQKYIGEGSRMVRELFVMAREHAPSIIFMDEIDSIGSSRGESGSGGGDSEVQRTMLELLNQLDGFESTKNIKVIMATNRIDILDSALLRPGRIDRKIEFPPPGPEARVSILRIHSRKMSLQRGINLRALAEKMGQCSGAEVRGICTEAGMYALRERRQHVTQEDFEFAVAKVLRKNQEGNTSVNKLFS

SEQ ID NO: 5528 - DNA, 1266 bp, Podospora anserina DSM 980
  CDS (1)..(1266)
atgggtgacgtcctggtcgaaagcgctgccaacagcgtccagcctcacaagaagagcatcccctccaccatccctagcatcgagaacttcgagggcgtaacgacagagggcaatgatgagtacgagaacctcaagcggctgcaacggcagctggagtacattcagctgcaggaggagtacatcaaggacgagcaaaggagtctgaagcgtgagttggtgcgggcacaggaggagatcaagcgcatccagagcgtcccgctggtcatcggccagttcatggaggccattgaccaaaacactggcatcgttcagtcctccaccggcagcaactacgtcgtccgcatcctgtccaccctcgaccgcgagaagctcaagccctcctcctcggtcgccctccaccgccactccaatgccctcgtcgacatcctcccccccgaagctgactcctccatcgccatgctcggcgccgacgaaaagcccgacgtgacctacgccgacgttggtggtctcgacatgcaaaagcaggaaatccgcgaggccgtcgagctccctctcacccatttcgacctctacaagcaaatcggcatcgaccctccccgcggtgttctcctctacggcccccccggtaccggcaagacgatgcttgtcaaggccgtcgccaactcgaccacggccaatttcatccgcgtggtcgggtccgagttcgtccagaaatatctcggtgaaggcccccgcatggtccgcgacgtcttccgcatggctcgcgagaacgccccggccatcatcttcatcgacgaaatcgacgccatcgccacgaagcgtttcgatgctcagaccggcgccgatcgggaagtccagcgtatcctgctcgaactcctcaaccaaatggatggtttcgaccagacggccaacgtcaaggtcatcatggccaccaaccgagccgacacgcttgatcctgcccttctccgtcccggccggctcgatcgcaagattgagttccccaaccttcgtgatcgccgtgagaggagactgatctttacgacgattgcgggcaagatgagcttggcgccagaggttgacttggatagtttgattacgaggaacgatccgctgagcggcgccgtgattgcggcgattatgcaggaggcggggctgagggcggtgagaaagaataggtacaacattattcagagcgatttggaggatgcgtatagcagccaggtgaaggggacgacggatgagaacaagtttgatttttacaaataa

SEQ ID NO: 5529 - protein, 421 aa, Podospora anserina DSM 980
MGDVLVESAANSVQPHKKSIPSTIPSIENFEGVTTEGNDEYENLKRLQRQLEYIQLQEEYIKDEQRSLKRELVRAQEEIKRIQSVPLVIGQFMEAIDQNTGIVQSSTGSNYVVRILSTLDREKLKPSSSVALHRHSNALVDILPPEADSSIAMLGADEKPDVTYADVGGLDMQKQEIREAVELPLTHFDLYKQIGIDPPRGVLLYGPPGTGKTMLVKAVANSTTANFIRVVGSEFVQKYLGEGPRMVRDVFRMARENAPAIIFIDEIDAIATKRFDAQTGADREVQRILLELLNQMDGFDQTANVKVIMATNRADTLDPALLRPGRLDRKIEFPNLRDRRERRLIFTTIAGKMSLAPEVDLDSLITRNDPLSGAVIAAIMQEAGLRAVRKNRYNIIQSDLEDAYSSQVKGTTDENKFDFYK

SEQ ID NO: 5530 - DNA, 1170 bp, Podospora anserina DSM 980
  CDS (1)..(1170)
atggcgctcgacaactactaccacaacaagattgagtcgatgcaactcgagattctcaagggtcaagccgttctccgtcgtctcgaagcccagcgcaatgactacaattcccgggtacgcctgctcagagaagagcttggtctgctacaacaaccgggctcgtacgtgggcgaggtcgtcaaggtgatgggcaccaagaaagttctggtcaaggtgcatcccgagggcaaatacgttgttgacattgccgactcggtcgacatcaccaaactcacacctggcaagcgcgtaaccttgctgtccgactcctacaagctcgagaagatgcttccttcctcggtcgatcccctcgtatctctaatgatggtcgaaaaggttcccgatagcacctacgacatgatcggcggtctcgaccaacaaatcaaggaaatcaaggaggtcatcgagctcgggctcaaacatccagagctctttgagtctctcggcattgcccaaccaaagggtgtcctcctctacggcccccctggaacgggaaagactcttttggctcgcgcggtggcccatcacacagactgcaagtttatccgtgtctccggctctgaactggttcaaaagtacattggtgagggttcgcgcatggtccgagagcttttcatcatggcccgtgagcacgctccctccatcatctttatggacgaaatcgactccatcggctcttcccgtgtcgaagggtcctcgggtggcgactcggaagtccagcgcaccatgttggagctcctcaaccagctcgacggtttcgagccaaccaagaacatcaaggtgattatggcaacgaaccgtctcgatatcctagacccagccctcctgcgcccggggcgcatcgaccgaaagatcgagttcccgcccccgagcgtggaagccagagccgatattctgcgaatccacagccgcaaaatgaacctgacacgcgggatcaacctgaccaagattgccgagaagatgaatggctgttcgggggccgagttgaagggcgtgtgtaccgaggcgggcatgtatgcccttcgcgagaggcgtgtgcatgtcacccaggaggactttgagctggcgacggccaagattctgaacaagcacgacgacaaggaggtgtctttggccaagctgtggcgttaa

SEQ ID NO: 5531 - protein, 389 aa, Podospora anserina DSM 980
MALDNYYHNKIESMQLEILKGQAVLRRLEAQRNDYNSRVRLLREELGLLQQPGSYVGEVVKVMGTKKVLVKVHPEGKYVVDIADSVDITKLTPGKRVTLLSDSYKLEKMLPSSVDPLVSLMMVEKVPDSTYDMIGGLDQQIKEIKEVIELGLKHPELFESLGIAQPKGVLLYGPPGTGKTLLARAVAHHTDCKFIRVSGSELVQKYIGEGSRMVRELFIMAREHAPSIIFMDEIDSIGSSRVEGSSGGDSEVQRTMLELLNQLDGFEPTKNIKVIMATNRLDILDPALLRPGRIDRKIEFPPPSVEARADILRIHSRKMNLTRGINLTKIAEKMNGCSGAELKGVCTEAGMYALRERRVHVTQEDFELATAKILNKHDDKEVSLAKLWR

SEQ ID NO: 5532 - DNA, 1383 bp, Podospora anserina DSM 980
  CDS (1)..(1383)
atgtctactctcgaggaccttgctggtctgaccagccgccgcgatgacgacgacaaaaagaaggacgagaagaaggacgacaagagcaagagacaaggggatggcgatgccgagatgaaggatgccgagcccgaggaggatgtgctggacgaggagattctggctcttgccacagaggacatcaacactcgccgccgacttctcgacaacgacgccagaatcatgagaagcgagtaccagcggttaacgcacgagaagcagactatgctggagaagatcaaggagaacaaggagaagattgacaacaacagacaactgccctatcttgttggcaatgtcgttgagctcttagacctcgaccccaccgccgaatcatccgaagagggcgccaacatcgacctggatgctatccgcgttggtaaatcggccgtgatcaagacatcgactaggcaaacgatcttcctacccctcatcggtctcgtcgacccggacaagctgcagcctgccgatcttatcggtgtgaataaggactcgtatcttattttggacactctgccggctgagtatgacagcagagtcaaggcgatggaggttgacgagaagcccacggagaagtacagcgatgttggtggtttggacaagcagatcgatgagatcatcgaggctattgtctggccgatgaaggaggctgagaggttcaagaagattggtatcaaggctccaaagggatgcttgatgtatggccctccaggtaccggcaagacgctcttggccagagcgtgcgctgcgcagactgatgccactttcctcaagcttgccggtccccaattggtgcagatgttcattggtgatggtgccaagcttgtgagagattgcttcgctctggcgaaggagaaggcccctgcgattatcttcattgacgagttggatgccattggtaccaagcgtttcgacagtgagaagagtggtgaccgtgaagtccaaagaaccatgttggagcttctcaatcagctggatggcttcgcctcggacgaccgcatcaaggtcatcgccgccacaaacagagtggatgtcctcgaccctgcgctgctgcgttccggccgtcttgatcgcaagattgagttcccgtatcccaacgaggaggcccgggctcagattctcaagatccactcccgcaagatgaaggtggatgagaacgtcaactggggcgaactggcgcgcagcacagacgagtttggtggtgccatgctcaaggctgtttgtgttgaggctggcatgattgccctgcggatggggaagaacaagattgggcatgagcactatgtcgatgccattgctgaagtacagtccaagaagaaagacacggtcaacttttatgcgtaa

SEQ ID NO: 5533 - protein, 460 aa, Podospora anserina DSM 980
MSTLEDLAGLTSRRDDDDKKKDEKKDDKSKRQGDGDAEMKDAEPEEDVLDEEILALATEDINTRRRLLDNDARIMRSEYQRLTHEKQTMLEKIKENKEKIDNNRQLPYLVGNVVELLDLDPTAESSEEGANIDLDAIRVGKSAVIKTSTRQTIFLPLIGLVDPDKLQPADLIGVNKDSYLILDTLPAEYDSRVKAMEVDEKPTEKYSDVGGLDKQIDEIIEAIVWPMKEAERFKKIGIKAPKGCLMYGPPGTGKTLLARACAAQTDATFLKLAGPQLVQMFIGDGAKLVRDCFALAKEKAPAIIFIDELDAIGTKRFDSEKSGDREVQRTMLELLNQLDGFASDDRIKVIAATNRVDVLDPALLRSGRLDRKIEFPYPNEEARAQILKIHSRKMKVDENVNWGELARSTDEFGGAMLKAVCVEAGMIALRMGKNKIGHEHYVDAIAEVQSKKKDTVNFYA

SEQ ID NO: 5534 - DNA, 1383 bp, Podospora anserina DSM 980
  CDS (1)..(1383)
atgggtcaaaaccagtcgggtatgggaggtggccacgatggcaaggatgacaaggacaagaagaaggagaagcacaagcacgaacctcccccgagacctaccacccgcatcggtcgcaagaagaagagagccggtggtgccagtgccgccgccaagttaccgcccgtctacccgaccagtcgatgcaagctcaggctgttgcgcatgcagcgtgttcacgaccacctgttgctcgaggaggaatatgtcgagaaccaagagcgcttgcgcaaggcgaaagccgccaaggacaatgccgttccagctgcctcggaagccgaggctgcggatcgcaatgccgatgaacgtggccgtgttgacgacatgcgtggtagcccaatgggagtcggaacccttgaagagatgattgacgacgaccacgccattgtcagcagcacgactggaccagagtattatgtaagcatcatgagttttgttgacaaggatctattggagcccggcgccagtgtcttgcttcaccataagactgtgagcatcgttggtgttctcacagatgacgcggatcccatagtcagcgtcatgaagctcgacaaggcgcctacggagtcgtacgcggatatcggtggtttggagcagcaaatccaggaggtgcgggaatctgtagagttgccactgctccatccggagctgtacgaggagatgggtatcaagcctcccaagggtgtcattctctacggtgcccccggtaccggaaagacgttactggcgaaggcggttgcaaaccagacttcggccactttcctgcgtattgttggtagcgagttgattcagaagtatctcggtgacggcccccggttggttcgccaactgttccaggttgctgccgagaatgccccgtcaatcgtcttcatcgatgaaatcgatgctatcggtaccaagcgttacgattcgacatcaggtggtgagcgtgaagtccaaagaactatgctggagcttctcaaccagcttgatggtttcgatgaccgcggtgacgtcaaggtgatcatggccaccaacaagatcgagtctcttgatcccgctctgatccgacccggacgtatcgaccgaaagatcctctttgagaatcccgaccagaacaccaagcgcaagatctttacactccacactagcaagatgtcacttaatgaggacgtcgatcttgaggagtttatcgcgcagaaggatgatctgtcaggtgccgacatcaaggctatttgctcagaggctggtctgatggctcttcgggagcgcagaatgcgggtacagatggccgacttccgcgccgctcgcgagagagtgttgcggacgaagcaggagggtgagcccgaggggttgtacttgtag

SEQ ID NO: 5535 - protein, 460 aa, Podospora anserina DSM 980
MGQNQSGMGGGHDGKDDKDKKKEKHKHEPPPRPTTRIGRKKKRAGGASAAAKLPPVYPTSRCKLRLLRMQRVHDHLLLEEEYVENQERLRKAKAAKDNAVPAASEAEAADRNADERGRVDDMRGSPMGVGTLEEMIDDDHAIVSSTTGPEYYVSIMSFVDKDLLEPGASVLLHHKTVSIVGVLTDDADPIVSVMKLDKAPTESYADIGGLEQQIQEVRESVELPLLHPELYEEMGIKPPKGVILYGAPGTGKTLLAKAVANQTSATFLRIVGSELIQKYLGDGPRLVRQLFQVAAENAPSIVFIDEIDAIGTKRYDSTSGGEREVQRTMLELLNQLDGFDDRGDVKVIMATNKIESLDPALIRPGRIDRKILFENPDQNTKRKIFTLHTSKMSLNEDVDLEEFIAQKDDLSGADIKAICSEAGLMALRERRMRVQMADFRAARERVLRTKQEGEPEGLYL

SEQ ID NO: 5536 - DNA, 1395 bp, Pyrenophora tritici-repentis Pt-1C-BFP
  CDS (1)..(1395)
atgggtaatcaacaatcgagtgctggaggcggcggccctcctggtgatgacaagagcaaaaaggacaagaaggacaagccaaagtacgagcccccgccacagcctacgacgcgcatcggcaggaagaaaaagaaggctgcaggtcccagcgccgctgcaaagctcccgaccgtgtacccgaccgcacgatgcaagctacggtacctccgaatgcagcgcattcacgaccatctgctcttggaggaggaatatgtcgagaaccaggaacgtctgcgcaaggcaaaggccgtaaaggaaggaaacgcgcctgccacatccacggccggggaaggccccgaggaccgcaatgccgacgagcgctcgcgggtcgacgacatgcgaggcagccccatgggcgtcggcaacctggaggagctcatcgacgacgaccatgccatcgtttccagcgccactgggcccgagtactatgtgtccatcatgtctttcgtcgacaaggacctgttagagcccggagcgagcatccttctgcatcacaagtccgtatcagtcgttggtgtgctcacagacgatgcggatccgttagtgtctgtcatgaagctagacaaggcacccacggagtcgtatgctgatatcggtggtctggaaacgcagatccaagaagtacgagaggcagtcgagctccctctcctgcatccggagctgtacgaggagatgggtatcaagccacccaagggtgtcattctctatggtgcacccggaaccggaaagacgctattggctaaggctgtggcaaatcagaccagtgcaactttcctccgtatcgtgggtagtgagttgattcaaaagtatctcggagacggcccaaggctagtgcgacagcttttccagactgctgctgagaatgcgccttcgattgtcttcattgacgaaatcgatgccattggaaccaagcgttacgagtctacgtctggcggtgagcgcgaaattcaacgaaccatgttggagcttctcaaccagctcgatggtttcgacgatcggggtgatgtcaaggtcatcatggctaccaacaagattgagacgctcgacccggcactcatccgtcctggtcgtattgatcgaaagattctctttgagaaccccgaccaaacgaccaagaagaagatcttcaccctccacacctcgaagatgtccctcaacgaggatgtcgatcttgacgagttcattaaccagaaggacgacctctccggtgccgatgtaaaagccatctgttccgaggctggtctcatggctctccgtgaacgccgtatgcgtgtcaacatggaggacttccgaactgcaagagaacgtgttctgaagacgaagactgagggtgagccagagggtttgtacttgtag

SEQ ID NO: 5537 - protein, 464 aa, Pyrenophora tritici-repentis Pt-1C-BFP
MGNQQSSAGGGGPPGDDKSKKDKKDKPKYEPPPQPTTRIGRKKKKAAGPSAAAKLPTVYPTARCKLRYLRMQRIHDHLLLEEEYVENQERLRKAKAVKEGNAPATSTAGEGPEDRNADERSRVDDMRGSPMGVGNLEELIDDDHAIVSSATGPEYYVSIMSFVDKDLLEPGASILLHHKSVSVVGVLTDDADPLVSVMKLDKAPTESYADIGGLETQIQEVREAVELPLLHPELYEEMGIKPPKGVILYGAPGTGKTLLAKAVANQTSATFLRIVGSELIQKYLGDGPRLVRQLFQTAAENAPSIVFIDEIDAIGTKRYESTSGGEREIQRTMLELLNQLDGFDDRGDVKVIMATNKIETLDPALIRPGRIDRKILFENPDQTTKKKIFTLHTSKMSLNEDVDLDEFINQKDDLSGADVKAICSEAGLMALRERRMRVNMEDFRTARERVLKTKTEGEPEGLYL

SEQ ID NO: 5538 - DNA, 1266 bp, Pyrenophora tritici-repentis Pt-1C-BFP
  CDS (1)..(1266)
atggctgacgccgccgtcgagaacccggccaacactgtcccgccgcacaagaagcagctcccgtcatcaataccgaactttgacaccctagagggtttctcgacagagggaaatgacgactactcgaccttcaagaagctgcaacggcaattagagtacatccacctccaggaagagtacatcaaggatgagcagcggagcctgaagcgagagttggtacgggcacaagaggagatcaagcgcatccagagtgtgccactggtgatagggcagtttatggaggctatcgatcagaacactggcatcgtacagtcatctactggatccaactacgtcgtccgcattctctccactctcgatcgcgaactcctcaagccatcgtcgtccgtcgcgctccaccgccactcaaatgcgctcgtcgacatcctaccacctgaggctgactcgtccattgccatgcttggtcaggatgagaagcccgacgtcacatatgccgacgtcggaggcttggatatgcagaagcaggagatccgggaagctgttgagctgcccctcacacatttcgacctgtacaagcagattggtatcgacccaccgcgcggtgtgctgctctacggccctccaggtaccggaaagaccatgttggtcaaggctgttgcaaacagcacaacggcatcgtttatccgcgtggtaggctccgagttcgtgcaaaagtacttgggtgagggtccacgcatggtgcgtgacgtcttcagaatggcacgcgagaactcaccatccatcatcttcattgacgagattgatgccattgctacaaaacgtttcgacgcgcagacgggtgccgaccgagaagtgcagcgtatcttgcttgaattgctcaaccagatggacggtttcgatcaaacctccaacgtcaaggtcatcatggccaccaaccgtgccgacacgctcgatcctgcgctcctccgtcccggtcgtctggacagaaagatcgaattcccctcgctacgagaccgtcgtgagcgccgtctcatcttctcgacgatcgcttccaagatgagtctgtcgcccgaggtggacctggatagcttgattgtgcgcaatgacccgttgtcgggtgccattatcgcagctatcatgcaagaggccggtctgcgagcggtacgcaagaacaggtataacattatccagagcgatttggaggaggcatacactagccaggtcaagggtgcagctgaggcggacaagtttgacttttacaagtaa

SEQ ID NO: 5539 - protein, 421 aa, Pyrenophora tritici-repentis Pt-1C-BFP
MADAAVENPANTVPPHKKQLPSSIPNFDTLEGFSTEGNDDYSTFKKLQRQLEYIHLQEEYIKDEQRSLKRELVRAQEEIKRIQSVPLVIGQFMEAIDQNTGIVQSSTGSNYVVRILSTLDRELLKPSSSVALHRHSNALVDILPPEADSSIAMLGQDEKPDVTYADVGGLDMQKQEIREAVELPLTHFDLYKQIGIDPPRGVLLYGPPGTGKTMLVKAVANSTTASFIRVVGSEFVQKYLGEGPRMVRDVFRMARENSPSIIFIDEIDAIATKRFDAQTGADREVQRILLELLNQMDGFDQTSNVKVIMATNRADTLDPALLRPGRLDRKIEFPSLRDRRERRLIFSTIASKMSLSPEVDLDSLIVRNDPLSGAIIAAIMQEAGLRAVRKNRYNIIQSDLEEAYTSQVKGAAEADKFDFYK

SEQ ID NO: 5540 - DNA, 1170 bp, Pyrenophora tritici-repentis Pt-1C-BFP
  CDS (1)..(1170)
atggcgctcgataccttctttcacaacaagatcgaggcaatgaagctcgagatcatacagggccaggcaaaactacggcgtcttgaagcccagcgcaatgactacaactcgcgcgtacggttactacgggaggagctcggccttctccagcagccggggtcttatgttggtgaggtggtgaaggtcatgggcaccaagaaggtccttgtcaaggtgcatcccgaaggcaaatacgtcgtcgatgtcgcagacagtgtcgacattagcaagctcacgcccggcaaacgtgtcaccctcctcagtgattcgtacaagctcgagaagctgcttccatcatccgttgacccgctcgtctcgctcatgatggtcgagaaggtgccagacagcacatacgacatgattggaggtctggaccagcagatcaaggaaatcaaagaggtcatcgagctgggtctgcaacatcccgaattgttcgaatcgctcggaatcgcgcagcccaagggtgtcttgctgtatggaccaccaggaacaggaaagacgctgcttgcccgtgccgtcgcgcatcacgccgactgcaagttcatccgagtgtctggtagcgaactggtacaaaagtacattggtgaaggtagtcgcatggttcgagaactgttcgtcatggcacgagagcacgcccctagcattatcttcatggacgaaattgacagcatcgggtcaagtcgtgttgaaggaagctcgggcggtgattccgaggtgcagaggaccatgttggaactgctcaaccagctggatggttttgagcctaccaagaacatcaagatcatcatggccaccaaccgactggatattctagatcccgctctattacgacccggacgtatcgaccgaaagattgagttcccaccgccaaccgttgaggcgcgtgccgacattctccgcattcactccaggagtatgaacctgactcgtggcatcaatctgaccaagattgcggagaagatgaacggctgctcgggtgctgagctgaagggtgtatgcacagaagctggaatgtacgctctcagagagaggagagtgcacgtaacgcaggaggactttgatctggcgacagccaaggtgctgaacaagcatgatgacaaggctaccagtttgagcaagctgtggaagtag

SEQ ID NO: 5541 - protein, 389 aa, Pyrenophora tritici-repentis Pt-1C-BFP
MALDTFFHNKIEAMKLEIIQGQAKLRRLEAQRNDYNSRVRLLREELGLLQQPGSYVGEVVKVMGTKKVLVKVHPEGKYVVDVADSVDISKLTPGKRVTLLSDSYKLEKLLPSSVDPLVSLMMVEKVPDSTYDMIGGLDQQIKEIKEVIELGLQHPELFESLGIAQPKGVLLYGPPGTGKTLLARAVAHHADCKFIRVSGSELVQKYIGEGSRMVRELFVMAREHAPSIIFMDEIDSIGSSRVEGSSGGDSEVQRTMLELLNQLDGFEPTKNIKIIMATNRLDILDPALLRPGRIDRKIEFPPPTVEARADILRIHSRSMNLTRGINLTKIAEKMNGCSGAELKGVCTEAGMYALRERRVHVTQEDFDLATAKVLNKHDDKATSLSKLWK

SEQ ID NO: 5542 - DNA, 1245 bp, Acyrthosiphon pisum
  CDS (1)..(1245)
atggaagaaattggtattgtcttgccagaaagggatgatagtcaggatgctaagcccactctccctaatttgaataatgttgaggcatgtttagacagtttggaccattattctagatacaagcgcttacaaaggtatttggaatttttgactgtacaagaagaatatattaaagatgaacaacgtaatttaaaaaaagaatacttacacgcacaagaagaagtgaaacgtattcaaagtgtcccacttgtaattggtcagtttttagaagcagttgaccaaaatactggtattgttggaagtactactggatcaaactattatgtacgtatattgtcaacaatcgatcgggaattattaaaaccatctgctagtgttgcattgcataaacatagtaatgctttggtcgatgtattaccaccagaagcagattcttctatatctatgctacaggctgatgaaaagcctgatattcaatacgctgatattggaggtatggatatgcaaaaacaagaaattcgagaagctgttgaattgccacttacacattttgagctatataagcaaattggtattgatccaccacgcggtgtcttaatgtatggaccacccggttgtggtaaaactatgttagctaaagctgtggctcaccatactactgctgcttttattcgtgtggttggttcagagtttgtccaaaaatacttaggagaaggaccgcgtatggtacgtgatgtctttcggttggctaaagaaaattcacctgctataatatttattgatgaaattgatgcaattgctactaaacgttttgatgcacaaactggagctgatcgtgaagtacagcgaatattacttgaacttcttaatcagatggatggttttgatcaaacaactaatgttaaagttataatggctaccaatcgagctgatactttagatccagctttattgcgtcctggtcgtttggaccgaaaaattgagtttccattgcctgatcgtagacaaaagcgtttagtattttcaacaataacagccaagatgaatctcagtgaagaagttgatttagaagattatgtggccagaccagataggatttctggagctgatataaatgcaatttgtcaagaggctggaatgcatgctgtacgtgaaaatcgttacattgtgttacctaaggattttgaaaaaggatacaaaaacaatatcaaaaaggatgaatcagaacatgaattctacaaataa

SEQ ID NO: 5543 - protein, 414 aa, Acyrthosiphon pisum
MEEIGIVLPERDDSQDAKPTLPNLNNVEACLDSLDHYSRYKRLQRYLEFLTVQEEYIKDEQRNLKKEYLHAQEEVKRIQSVPLVIGQFLEAVDQNTGIVGSTTGSNYYVRILSTIDRELLKPSASVALHKHSNALVDVLPPEADSSISMLQADEKPDIQYADIGGMDMQKQEIREAVELPLTHFELYKQIGIDPPRGVLMYGPPGCGKTMLAKAVAHHTTAAFIRVVGSEFVQKYLGEGPRMVRDVFRLAKENSPAIIFIDEIDAIATKRFDAQTGADREVQRILLELLNQMDGFDQTTNVKVIMATNRADTLDPALLRPGRLDRKIEFPLPDRRQKRLVFSTITAKMNLSEEVDLEDYVARPDRISGADINAICQEAGMHAVRENRYIVLPKDFEKGYKNNIKKDESEHEFYK

SEQ ID NO: 5544 - DNA, 1323 bp, Acyrthosiphon pisum
  CDS (1)..(1323)
atgggtcaaagtcattcagccggtggtggtgctggtggtgaaaagaaagacgacaaagacaaaaagaagaagtatgaaccaccaatcccaacaagagtggggaagaaaaggaagcgtgcaaagggtccagacacagctactaaactaccattgattactccacacacaagatgtcgtttgaagttgttgaaattggaacgtgtcaaggattatttaatgatggaagaagaattcatactgaaccaagaacggcttaagccccaagaagaaaggaatgaagaagaacgttcaagagtagatgatctacgtggaagcccaatgtctgttggtacattggaagagattattgatgataatcatgcaatagtgtcaacatctgttggaagtgagcattatgttagcattttgtcatttgtcgacaaagatcagttggaacccgggtgctcagtattacttaaccacaaagtccatgcagtggttggagtactatcagatgatacagatcctatggtaactgtgatgaaattagaaaaagcaccacaagaaacttatggtgatattggtggtttagatcaacagatccaagaaattaaagaatctgttgaacttcctttaactcatcctgaatattatgaagaaatgggtattaaaccacctaaaggagttattctgtatggacctccaggaacaggtaaaacccttttggctaaagctgttgccaaccagacctcggcaacattcttacgagttgttggatctgaacttatccagaaatatttgggagatggtcccaaattggtaagagaactgttccgtgtagctgaggaacacgcaccatccatagtatttattgatgaaatagatgcagtgggtactaaacgttatgactcaaattctggaggtgagcgtgaaattcagcgtactatgttggaacttcttaatcaattggatgggtttgattccagaggtgatgttaaggtggttatggccacaaatcgtattgaaactttggatccagcattgattcgtccaggtcgtattgatcgtaaaatcgagttccccttgccagatgaaaaaacaaaacgtcgtatatttaatatacacacttccagaatgacattggctgaaggtgttaatctccaagagctcattatggccaaggatgatctttctggtgctgatatcaaagctatttgtactgaagctggtttgatggctctccgtgaacgtcgtatgaaagtaaccaatgaagatttcaagaagtccaaagagagtgtcttataccgtaagaaagaaggcacacctgaaggattatatttgtaa

SEQ ID NO: 5545 - protein, 440 aa, Acyrthosiphon pisum
MGQSHSAGGGAGGEKKDDKDKKKKYEPPIPTRVGKKRKRAKGPDTATKLPLITPHTRCRLKLLKLERVKDYLMMEEEFILNQERLKPQEERNEEERSRVDDLRGSPMSVGTLEEIIDDNHAIVSTSVGSEHYVSILSFVDKDQLEPGCSVLLNHKVHAVVGVLSDDTDPMVTVMKLEKAPQETYGDIGGLDQQIQEIKESVELPLTHPEYYEEMGIKPPKGVILYGPPGTGKTLLAKAVANQTSATFLRVVGSELIQKYLGDGPKLVRELFRVAEEHAPSIVFIDEIDAVGTKRYDSNSGGEREIQRTMLELLNQLDGFDSRGDVKVVMATNRIETLDPALIRPGRIDRKIEFPLPDEKTKRRIFNIHTSRMTLAEGVNLQELIMAKDDLSGADIKAICTEAGLMALRERRMKVTNEDFKKSKESVLYRKKEGTPEGLYL

SEQ ID NO: 5546 - DNA, 1341 bp, Drosophila ananassae
  CDS (1)..(1341)
atgttgattgtggtattgctacagggacaaaatcaatcggcccaagggggagctggcgacaagaaggatgataaggataaaaagaagaagtacgagcctccaatcccgacccgcgtcggcaaaaagaagcgccgtgccaagggtccggatgcggccatgaagctacctcaggtgacgccgcacacccgctgccgcctaaagctgctcaagttggagcgcatcaaggactacctcatgatggaagacgaattcatccggaaccaggagcgtctgaagccacaggacgagaagaacgaggaggagcgctccaaggtcgatgacctgcgcggcacacccatgtcggtgggcaacctcgaagagatcatcgacgacaatcacgccattgtctccacttctgtgggctccgagcactacgttagcattctttctttcgtggacaaggaccagctggagcctggctgctccgtcctgcttaaccacaaagttcacgctgttgtaggagttctcagcgatgacaccgatcccatggtgaccgtgatgaagctggagaaggcccctcaggagacatacgcggatatcggtggcttggacactcagatccaggagatcaaggagtctgtggaactgccactgacacatcctgagtactacgaagagatgggcatcaaaccaccaaagggtgttatcctatatggtcctcccggtacaggaaaaaccttgctggccaaggcggtggccaatcagacctccgccactttcctgcgcgttgtgggttccgagctgatccagaagtatctgggagatggacccaagctggttcgagagcttttccgtgtggccgaggagcacgctccctccattgtgttcatcgacgagattgatgccgtcggtaccaagcgttatgactcgaactctggtggcgagcgagagatccagcgtaccatgttggagttgctcaaccagctggacggattcgattcgcgtggtgacgtgaaggttattatggccactaaccgcattgagactttggatccggcgctgatccgtcctggccgtatcgaccgcaagatcgagttccccctgccggatgaaaagaccaaacgccgcatcttcaccatccatacatcccgtatgacactggccgaagacgtgaacctcagtgagttgatcatggctaaggacgatctctcgggcgctgatataaaggccatctgcacagaggccggtttgatggcgctgcgcgagcgccgaatgaaggtgaccaacgaggatttcaagaagtcgaaggaaagcgttctctaccgaaagaaggagggtacgcccgagggcctgtatttataa

SEQ ID NO: 5547 - protein, 446 aa, Drosophila ananassae
MLIVVLLQGQNQSAQGGAGDKKDDKDKKKKYEPPIPTRVGKKKRRAKGPDAAMKLPQVTPHTRCRLKLLKLERIKDYLMMEDEFIRNQERLKPQDEKNEEERSKVDDLRGTPMSVGNLEEIIDDNHAIVSTSVGSEHYVSILSFVDKDQLEPGCSVLLNHKVHAVVGVLSDDTDPMVTVMKLEKAPQETYADIGGLDTQIQEIKESVELPLTHPEYYEEMGIKPPKGVILYGPPGTGKTLLAKAVANQTSATFLRVVGSELIQKYLGDGPKLVRELFRVAEEHAPSIVFIDEIDAVGTKRYDSNSGGEREIQRTMLELLNQLDGFDSRGDVKVIMATNRIETLDPALIRPGRIDRKIEFPLPDEKTKRRIFTIHTSRMTLAEDVNLSELIMAKDDLSGADIKAICTEAGLMALRERRMKVTNEDFKKSKESVLYRKKEGTPEGLYL

SEQ ID NO: 5548 - DNA, 1242 bp, Drosophila ananassae
  CDS (1)..(1242)
atgccgtacaacatggacgtactgatgccggagaaggatgagctctccgaactgaaactgaaggatgcccacagttccctcgatgaactggacattgatgatctgtatgtgcggtacaagaaactgcaaaagaccctggaattcatcgaggtgcaggaggagtacatcaaggatgagcagaggaacctgaagaaggagtatctgcacgcccaggaggaggtgaaacgcatccagtccgtgccgctggtaatcggccagttcctggaggccgtcgatcagaacactggcattgtcggctccaccacaggcagcaactactacgttcgcatcctctccaccatcgatcgggagctgctgaagccctccgcctcggtggcactgcacaagcacagcaatgccttggtcgatgtactgccgccagaggcggacagctccatatcgatgctgcagccggacgagaagccggacgtcagctacgccgacatcggtggcatggacatgcagaagcaggaaatccgcgaggcagtcgagctgcccctaacccactttgagctctacaagcagatcggtatcgacccgccgcgcggtgtcctgatgtacggtcccccgggctgcggcaagactatgctggccaaggccgtggcccaccacaccactgcctcgtttatccgggtcgtgggttcggagttcgtgcagaagtacctcggcgagggtccgcgcatggtgcgcgacgtcttccgactggccaaggagaacgcgccggccatcatcttcatcgacgagatcgatgccattgccacgaagcgtttcgacgcccagaccggcgccgatcgtgaggtgcagcgcatcctgttggagctcctcaaccagatggacggcttcgatcagaccacgaacgttaaggtgatcatggccaccaatcgggcagacactctggatccggctctcctgcgtcccggtcgtctggatcgtaagatcgagttcccactgcccgatcgccgccagaagcgactggtcttctccacgatcacctccaagatgaacctcagcgaggacgtggaccttgaggagtttgtggcgcgaccggacaagatatccggcgccgatatcaatgccatctgccaggaggccggcatgcatgctgtgcgcgagaaccgctacattgttctggccaaggacttcgagaagggctacaagaacaacatcaagaaggacgagcaggagcacgagttctacaaatag

SEQ ID NO: 5549 - protein, 413 aa, Drosophila ananassae
MPYNMDVLMPEKDELSELKLKDAHSSLDELDIDDLYVRYKKLQKTLEFIEVQEEYIKDEQRNLKKEYLHAQEEVKRIQSVPLVIGQFLEAVDQNTGIVGSTTGSNYYVRILSTIDRELLKPSASVALHKHSNALVDVLPPEADSSISMLQPDEKPDVSYADIGGMDMQKQEIREAVELPLTHFELYKQIGIDPPRGVLMYGPPGCGKTMLAKAVAHHTTASFIRVVGSEFVQKYLGEGPRMVRDVFRLAKENAPAIIFIDEIDAIATKRFDAQTGADREVQRILLELLNQMDGFDQTTNVKVIMATNRADTLDPALLRPGRLDRKIEFPLPDRRQKRLVFSTITSKMNLSEDVDLEEFVARPDKISGADINAICQEAGMHAVRENRYIVLAKDFEKGYKNNIKKDEQEHEFYK

SEQ ID NO: 5550 - DNA, 1218 bp, Drosophila ananassae
  CDS (1)..(1218)
atgcgcctattcaaggaagaaatcgccctttttcaccaaaagtccctggcaaaatatgagggcttggatgaagccgacttgtatgttatgtacaagaagttgcaaatggagttggagcttatccaagttcaggaggactacatcaaggaagagcagcgcaacttaaaaaaagaattcattcatgctcaggaggaggtgaagcgcattaaggccgttcccctggtcatcgggcaattcttagaggcggtcgatgagaacaacggaattgtggcgtccaccacgggttccaattactacgtccgtgtactttctactatcgacagggagcagctaaagccttcgtcttcggtggccctgcataagcagagcaactgtttggtagatttggtgcctccggaggcggatagcactatatccatgctgactccggaagagagacctgatgtccactattcagatattgggggactggatgttcagaaacaggagatacgcgaagctgtggagctgccccttacgcatgcgcagttgtataagcagattggcatcgatcctccccgaggagtccttctctttggtcctcctggatgtgggaaaacaatgttggcgaaagccgtagctcatcacaccactgcttcttttattcgtgtagtgggttctgagttcgtccagaagtacttgggcgagggtcctcgcatggtccgcgatctattccgtctggccaagcagaatgcgccatccgttattttcattgatgaaattgatgccattgctaccaaacgttttgatgcgcaaaccggagccgatcgggaagtacagcgcattttgctggagctcctcaaccagatggatggtttcgacgaaacaaccaatatcaaggtaatcatggccaccaatcgcgctgataccttggatccagctcttttgcgtcccggccgtcttgaccgaaaaatagagtttccactgccggatcgtcgccaaaagcgccttgttttctcaacaatcacatcaaagatgaatcttagcgaggacgtggatctggaggatattgtagcacgtccggacaagatctcaaatgcagatattaatgccatttgtcaggaggctggaatgcacgctgtgcgcgagaatcgctacgttgtcaactttaaagactttgaaaagggctacaagaccagcgtgcgcaaggatgagacccagcacgagttttacaattag

SEQ ID NO: 5551 - protein, 405 aa, Drosophila ananassae
MRLFKEEIALFHQKSLAKYEGLDEADLYVMYKKLQMELELIQVQEDYIKEEQRNLKKEFIHAQEEVKRIKAVPLVIGQFLEAVDENNGIVASTTGSNYYVRVLSTIDREQLKPSSSVALHKQSNCLVDLVPPEADSTISMLTPEERPDVHYSDIGGLDVQKQEIREAVELPLTHAQLYKQIGIDPPRGVLLFGPPGCGKTMLAKAVAHHTTASFIRVVGSEFVQKYLGEGPRMVRDLFRLAKQNAPSVIFIDEIDAIATKRFDAQTGADREVQRILLELLNQMDGFDETTNIKVIMATNRADTLDPALLRPGRLDRKIEFPLPDRRQKRLVFSTITSKMNLSEDVDLEDIVARPDKISNADINAICQEAGMHAVRENRYVVNFKDFEKGYKTSVRKDETQHEFYN

SEQ ID NO: 5552 - DNA, 1233 bp, Drosophila erecta
  CDS (1)..(1233)
atggacgcactgatagcggagaagcacgacgagctcttcgacttgaagccgaaagatgcgcacagttccctggacgaactggacatggaggatctctacgtgcgctacaagaaactgcaaaggactttggaattcattgaggtccaggaggagtacatcaaggacgagcagcggaacctgaagaaggagtacctgcacgcccaggaggaggtgaagcgcatccagtcggtgccactggtcattggccagttcctggaggccgtcgatcagaacactggcattgtgggttccaccaccggctccaattactatgtgcgcatcctgtccaccatcgatcgggagctgctgaagccctccgcctcggtggccctgcacaagcacagcaacgccctggtggacgtgctgccgccagaggcggatagctccatttcgatgctgcagccggatgagaagcccgatgttagctatgcggacattggtggcatggacatgcagaagcaggagatccgtgaggcagtcgaactgcctctgactcacttcgagctgtacaagcagatcggtattgatccgccgcgcggtgtgcttatgtacggtccgccaggatgcggcaagaccatgttggccaaggcggtcgcccaccacacaacggcctcgttcatacgcgtggtcggctcggagttcgtgcagaagtacctcggcgagggaccgcgcatggtgcgcgacgtgttcaggctggccaaggagaacgcaccggccatcatcttcattgacgagatcgacgccattgccacgaagcgtttcgatgcgcagacgggcgccgatcgtgaggtgcagcgcatcctgctcgagctgctcaaccaaatggacggcttcgatcagaccaccaacgttaaggtgatcatggccactaaccgggctgacacactggatcccgctctgctgcgacctggtcgactggatcgtaagattgagttcccgctgcccgatcgccgccagaagcgactcgtcttctccaccatcacttcaaagatgaacctcagcgaggacgtcgatttggaggagtttgtggcgcggccggacaagatatccggcgccgatatcaacgccatttgccaggaggcgggcatgcacgcggtgcgtgagaatcgttacatcgtcttggccaaggacttcgagaagggctacaagaacaacatcaagaaggacgagcaggagcacgagttctacaaatag

SEQ ID NO: 5553 - protein, 410 aa, Drosophila erecta
MDALIAEKHDELFDLKPKDAHSSLDELDMEDLYVRYKKLQRTLEFIEVQEEYIKDEQRNLKKEYLHAQEEVKRIQSVPLVIGQFLEAVDQNTGIVGSTTGSNYYVRILSTIDRELLKPSASVALHKHSNALVDVLPPEADSSISMLQPDEKPDVSYADIGGMDMQKQEIREAVELPLTHFELYKQIGIDPPRGVLMYGPPGCGKTMLAKAVAHHTTASFIRVVGSEFVQKYLGEGPRMVRDVFRLAKENAPAIIFIDEIDAIATKRFDAQTGADREVQRILLELLNQMDGFDQTTNVKVIMATNRADTLDPALLRPGRLDRKIEFPLPDRRQKRLVFSTITSKMNLSEDVDLEEFVARPDKISGADINAICQEAGMHAVRENRYIVLAKDFEKGYKNNIKKDEQEHEFYK

SEQ ID NO: 5554 - DNA, 1320 bp, Drosophila erecta
  CDS (1)..(1320)
atgggacaaaaccaatcggcccaagggggagctggcgacaagaaagatgacaaggataaaaagaagaagtacgagcctccaatcccgacgcgcgttggcaagaagaagaggcgcgcaaagggtccggatgcagccatgaagctgccccaggttacgccccacacccgctgccgccttaagctgctcaagctggagcgcattaaggactacctgatgatggaggacgagttcatccgcaaccaggagcgcctgaaaccccaggacgagaagaacgaggaggagcgctccaaggtcgacgacctgcgcggcacccccatgtccgtgggcaacctggaggagataatcgacgacaaccacgccatcgtgtccacatcggtgggctccgagcactatgtcagcatcctgtcctttgtggacaaggatcagctggaaccaggctgctcagtgctgcttaaccacaaagtgcacgctgtggtcggagttctcagcgacgacaccgatccaatggtcacggtgatgaaactagaaaaggccccgcaggagacttacgcagatatcggtggattggacactcagatccaggagatcaaggagtctgtcgagctgccgctgacccatcccgagtactacgaggagatgggcatcaagcctcccaagggcgtcatcctatatgggcctcctggaacgggcaagaccctgctggccaaggctgtggccaaccagacctcggccactttcctgcgagttgtgggctcagagttgatccagaagtacctgggagacggacccaagctagtgcgtgagctcttccgtgtggctgaggagcacgctccatctattgtgttcatcgatgaaatcgatgcagtgggcacaaagcgctacgattcaaattctggtggcgagcgggagattcagcgtaccatgttggagctactgaaccagctggatggtttcgattcacgcggcgatgtcaaggttatcatggccaccaatcgtatcgagaccctggacccggcgctaattcgtcccggtcgtattgaccgcaagatcgagttcccgctgcccgatgagaagaccaagcgccgcatctttaccatccacacatcgcgcatgacgctggccgaggatgtgaacctcagcgaactgatcatggccaaggatgatctatccggcgccgacatcaaggccatctgcacagaggccggtttgatggcgctgcgggagcgccgcatgaaggtgaccaacgaggacttcaagaaatcaaaggagagcgtcttgtatcggaagaaggagggcacgcccgagggtctttatttataa

SEQ ID NO: 5555 - protein, 439 aa, Drosophila erecta
MGQNQSAQGGAGDKKDDKDKKKKYEPPIPTRVGKKKRRAKGPDAAMKLPQVTPHTRCRLKLLKLERIKDYLMMEDEFIRNQERLKPQDEKNEEERSKVDDLRGTPMSVGNLEEIIDDNHAIVSTSVGSEHYVSILSFVDKDQLEPGCSVLLNHKVHAVVGVLSDDTDPMVTVMKLEKAPQETYADIGGLDTQIQEIKESVELPLTHPEYYEEMGIKPPKGVILYGPPGTGKTLLAKAVANQTSATFLRVVGSELIQKYLGDGPKLVRELFRVAEEHAPSIVFIDEIDAVGTKRYDSNSGGEREIQRTMLELLNQLDGFDSRGDVKVIMATNRIETLDPALIRPGRIDRKIEFPLPDEKTKRRIFTIHTSRMTLAEDVNLSELIMAKDDLSGADIKAICTEAGLMALRERRMKVTNEDFKKSKESVLYRKKEGTPEGLYL

SEQ ID NO: 5556 - DNA, 1227 bp, Drosophila grimshawi
  CDS (1)..(1227)
atggatgtaccgatgcctgaaaaagatgagctcgaactgaagctgaaggacgcacacagctccctcgatgaattggacatggatgatttgtatgtgcgctacaagaaattgcaaaagacactggaattcattgaggtacaggaggagtacattaaggatgagcagcgcaatttgaagaaggagtatctgcatgcacaggaggaagtgaagcgtatacaatcggtgccgctggtgattggccaattcctggaggctgttgatcagaatacgggcattgttggctccacaaccggttccaattactatgtacgcatcttgtccaccattgatcgtgagctgcttaaaccatccgcatcggtggcactgcacaagcatagcaatgcattggtcgatgtattaccaccagaggcggatagctccatatcgatgctgcaaccggatgagaaaccagacgttagctatgcggacattggtggcatggacatgcaaaagcaagagatacgtgaagccgtcgagctgcccctgacacactttgagctctacaaacagattggcattgatcccccgcgcggtgtcctcatgtacggcccgcccggttgtggcaaaacgatgctggccaaggctgttgcacatcatacgacggcagcgtttatacgtgtcgtcggctccgagtttgtgcagaaatatttgggcgagggaccgcgcatggtgcgcgatgtcttccgcctggccaaggagaatgcgcccgcaatcatttttatcgatgaaatcgatgcgatcgccaccaaacgtttcgatgcccaaactggcgccgatcgtgaagtgcagcgcattctgctcgaactgctcaaccagatggatggcttcgatcagacgaccaatgtgaaggtgatcatggcgaccaatcgtgccgatacactagatccggcactgttgcgtcccggtcgtttagatcgtaaaattgagttcccgctgcccgatcggcgccagaagcgtttggtcttctcaacgatcacatcaaagatgaacctcagcgaggatgttgacctggaggagtttgtagcacggcccgataaaatttctggtgctgatataaatgccatctgccaggaggctggcatgcatgcggtgcgtgagaatcggtatattgtccttgccaaggactttgagaagggctacaagaacaatatcaagaaggacgaacaggagcacgagttctacaaataa

SEQ ID NO: 5557 - protein, 408 aa, Drosophila grimshawi
MDVPMPEKDELELKLKDAHSSLDELDMDDLYVRYKKLQKTLEFIEVQEEYIKDEQRNLKKEYLHAQEEVKRIQSVPLVIGQFLEAVDQNTGIVGSTTGSNYYVRILSTIDRELLKPSASVALHKHSNALVDVLPPEADSSISMLQPDEKPDVSYADIGGMDMQKQEIREAVELPLTHFELYKQIGIDPPRGVLMYGPPGCGKTMLAKAVAHHTTAAFIRVVGSEFVQKYLGEGPRMVRDVFRLAKENAPAIIFIDEIDAIATKRFDAQTGADREVQRILLELLNQMDGFDQTTNVKVIMATNRADTLDPALLRPGRLDRKIEFPLPDRRQKRLVFSTITSKMNLSEDVDLEEFVARPDKISGADINAICQEAGMHAVRENRYIVLAKDFEKGYKNNIKKDEQEHEFYK

SEQ ID NO: 5558 - DNA, 1320 bp, Drosophila grimshawi
  CDS (1)..(1320)
atgggccaaaaccaatcggcacaggggggagctggagataagaaggatgacaaagacaaaaagaagaaatacgagccaccaattccgactcgcgttggcaaaaagaagcgacgcgcaaagggtccagatgcagccatgaaacttccccaagtgacaccccatacacgctgtcgccttaagctgctcaaattggagcggataaaggattatctgatgatggaggatgagttcatacgcaaccaggagcgcctcaagccacaagacgagaagaacgaagaggaacgatccaaagtggatgacttgcgtggcacccccatgtctgtgggcaacttggaggagattatcgatgacaatcacgccattgtctcgacttccgtcggttccgagcactatgtcagcattctgtcgtttgtcgacaaggatcaactggagcctggttgctcggtgctcttgaatcacaaggttcacgctgtggttggtgttctcagcgacgacacagatcccatggttacggtcatgaagctagagaaggcgccgcaagaaacctacgctgacattggtggcctggacacacaaatccaggagatcaaagagtccgttgagcttcccctaacgcatcccgaatactacgaggaaatgggtatcaagccaccaaagggcgtcattctctacggtcctcccggtacagggaagacccttctcgccaaggctgtcgccaatcaaacctcggctactttcctgcgtgtcgtcggctccgaactcatacagaagtatttgggcgatggccccaaacttgtgcgtgagttgttccgcgtggccgaggaacatgccccgtccattgtattcattgacgagattgacgctgtgggcactaagcgatacgattctaattcgggtggcgagcgtgaaattcagcgcactatgttggagctgctcaatcaactggatggtttcgattcgcgtggcgatgtcaaagtcatcatggcaacgaatcgcattgagacactcgatccagcactaatacgtccgggacgtatcgatcgtaaaatcgagtttccactgcctgatgagaagacaaagcgacgcatcttcaccatacacacatcgcgtatgactctcgccgaggatgtgaatctgaatgagctgatcatggccaaggacgatctgtcgggcgctgacatcaaggccatttgcaccgaggctggtctgatggcgctccgcgagcgtcgcatgaaggtcaccaatgaggacttcaagaagtcgaaggaaagtgtcttgtaccgaaagaaggagggcacgcccgagggactctatttataa

SEQ ID NO: 5559 - protein, 439 aa, Drosophila grimshawi
MGQNQSAQGGAGDKKDDKDKKKKYEPPIPTRVGKKKRRAKGPDAAMKLPQVTPHTRCRLKLLKLERIKDYLMMEDEFIRNQERLKPQDEKNEEERSKVDDLRGTPMSVGNLEEIIDDNHAIVSTSVGSEHYVSILSFVDKDQLEPGCSVLLNHKVHAVVGVLSDDTDPMVTVMKLEKAPQETYADIGGLDTQIQEIKESVELPLTHPEYYEEMGIKPPKGVILYGPPGTGKTLLAKAVANQTSATFLRVVGSELIQKYLGDGPKLVRELFRVAEEHAPSIVFIDEIDAVGTKRYDSNSGGEREIQRTMLELLNQLDGFDSRGDVKVIMATNRIETLDPALIRPGRIDRKIEFPLPDEKTKRRIFTIHTSRMTLAEDVNLNELIMAKDDLSGADIKAICTEAGLMALRERRMKVTNEDFKKSKESVLYRKKEGTPEGLYL

SEQ ID NO: 5560 - DNA, 1179 bp, Drosophila grimshawi
  CDS (1)..(1179)
atgaataatattgatccagaaatgcttgatgagagtgatttttatgtgatttacaagaaattgcaactggaattagagctactacgcgttcaggaatactacataaaggaggagcagagcaatctaaaaaaggagtatttgcatgctcaggaggaggttaagcgtgttaaagcagtgcccctggttattggtcaatttctcgaagccgttgatgagcacaccggtattatagcctcaacaacgggttccagttactatgtgcgcgtcttatccactatagatcgggaacatctaaagccatcgacttcggtggccttgcacaagcatagcaattgtttggtggacttggtgccgccagaagcagatagcactatctcattgatgacaccggatgagaaaccagatgtgacatacgccgacatcggtggactcgatatgcaaaaacaagaaattcgggaggccgtcgaattgccattgactcacgcccatttgtataagcaaattggcattgatccacctcgcggagtgctactctatggtccgccgggttgcggcaaaacgatgctggccaaggcagtcgccaatcagacaactgctgcatttatccatgtcgtgggctcagagtttgtgcagaagtacttgggagagggaccacgaatggtgcgtgatatattccggctggccaagcagaatgcaccttcggtcatattcattgatgagatcgatgcgattgccactaaacgctttgatgcccagactggcgccgaccgggaagtgcagcgcattttgctggagctcttgaatcagatggacggattcgatgagactaccaacataaaggtaatcatggcaaccaatcgtgcagacaccctagatccggctctgctgcgtccgggtcgcttggatcgtaagattgagttccctttgccggatcgccggcagaagcgtttggttttcactaccattacggctaaaattaatctcgccgaagatgtcgatctggaggagctaattgctcgcgccgaccgaatctcgaacgccgacattaacgctatctgccaagaggctgggatgcacgcagtccgtgaaaatcgttatatcgtgcacgcaaaggactttgagaagggctacaagactagcgttaaaaaggacgactctgtgcacgagttttacagttaa

SEQ ID NO: 5561 - protein, 392 aa, Drosophila grimshawi
MNNIDPEMLDESDFYVIYKKLQLELELLRVQEYYIKEEQSNLKKEYLHAQEEVKRVKAVPLVIGQFLEAVDEHTGIIASTTGSSYYVRVLSTIDREHLKPSTSVALHKHSNCLVDLVPPEADSTISLMTPDEKPDVTYADIGGLDMQKQEIREAVELPLTHAHLYKQIGIDPPRGVLLYGPPGCGKTMLAKAVANQTTAAFIHVVGSEFVQKYLGEGPRMVRDIFRLAKQNAPSVIFIDEIDAIATKRFDAQTGADREVQRILLELLNQMDGFDETTNIKVIMATNRADTLDPALLRPGRLDRKIEFPLPDRRQKRLVFTTITAKINLAEDVDLEELIARADRISNADINAICQEAGMHAVRENRYIVHAKDFEKGYKTSVKKDDSVHEFYS

SEQ ID NO: 5562 - DNA, 1179 bp, Drosophila mojavensis
  CDS (1)..(1179)
atggataacaatgaaccgaaaatcttagatgaaagcgatttttatgttatgtataagagattgcagctgcagctggaattgctccatgtgcaggaagactacattaaggaggagcagcgctatctgaaaaaagagtatgtgcacgcacaggaagaggtgaagcgggccaaggctgtgcctctggtcattgggcaatttctcgaggcagttgatgagaacactggtattgtggcatccaccacgggctccaattattatgtgcgcgtgctgtccacaattgacagggaacaactgaagccgtccacttcggttgcgttgcacaagcaaagtaactgtttagtggacctggtgcctccggaggcagacagtaccatctcaatgttgtcgccagaagagagacccaatataacctatgcagatattggcggacttgatatgcaaaagcaagaaatacgcgaagctgtcgaattgccattgactcacgcgcatttgtataagcagattggcattgacccaccacgcggagtgcttctctacggtccccctggctgcggcaagacaatgttagctaaagcagtcgctaatcacaccacagcatctttcattgctgttgttggctcggagtttgtgcaaaaatacctgggagaaggaccacgtatggttcgtgatctgttccgcctggccaaacagaatgccccatccgttatttttattgatgaaatcgatgcgattgcaaccaaacgttttgatgctcaaaccggcgccgatcgcgaagttcagcgcatattactagagctattaaatcaaatggatggtttcgatgaaaccaccaacatcaaggtaattatggccactaatcgcgctgatactttagatccagccctccttcgccccggacgcttggatcgcaagatagaatttccgttgccggaccgccgtcaaaagcgtttgatttttaccaccataacagccaaaatgaatctagccgaagacgttgatttggaggagctcattgctcgcccggacaaaatttcgaatgccgacatcaacgcgatttgccaggaagctggaatgcatgcagttcgggaaaatcgttatatcgcacacgctaaagactttgaaaaaggctacaaaacaagcgtgcggaagaatgaatctcagcacgaattttataattaa

SEQ ID NO: 5563 - protein, 392 aa, Drosophila mojavensis
MDNNEPKILDESDFYVMYKRLQLQLELLHVQEDYIKEEQRYLKKEYVHAQEEVKRAKAVPLVIGQFLEAVDENTGIVASTTGSNYYVRVLSTIDREQLKPSTSVALHKQSNCLVDLVPPEADSTISMLSPEERPNITYADIGGLDMQKQEIREAVELPLTHAHLYKQIGIDPPRGVLLYGPPGCGKTMLAKAVANHTTASFIAVVGSEFVQKYLGEGPRMVRDLFRLAKQNAPSVIFIDEIDAIATKRFDAQTGADREVQRILLELLNQMDGFDETTNIKVIMATNRADTLDPALLRPGRLDRKIEFPLPDRRQKRLIFTTITAKMNLAEDVDLEELIARPDKISNADINAICQEAGMHAVRENRYIAHAKDFEKGYKTSVRKNESQHEFYN

SEQ ID NO: 5564 - DNA, 1320 bp, Drosophila mojavensis
  CDS (1)..(1320)
atgggacaaaatcaatcggcacagggtggcactggagacaagaaggatgacaaagacaaaaagaagaaatatgagccaccaattcccactcgcgttggcaaaaagaagcgtcgcgcaaagggtccagatgccgccatgaagctgccactagtgactcctcatactcgctgtcgtctaaagctgctcaaattggagcgcatcaaggattacttgatgatggaggacgagtttatacgcaaccaggaacgactcaagccacaagacgaaaagaacgaagaagaacgctcgaaggttgatgacttgcgtggcacaccaatgtctgtgggcaatttggaggagattatcgatgacaatcatgcaattgtgtcgacatccgtgggctcggagcactatgttagcattctgtccttcgttgacaaggaccaattagagcctggctgctctgtcctgttgaatcataaggttcatgctgtagtgggtgtcctcagcgacgacacagaccccatggttacggtcatgaagctagaaaaagcgccacaagaaacatatgcagacattggtgggttggacactcaaattcaggagatcaaagaatctgtcgagcttccgctaactcatcccgaatactacgaagaaatgggcattaaaccaccaaagggagttattctgtatggtcccccgggtacgggtaaaacgcttctcgccaaggccgttgccaatcagacttcagcgaccttcttacgtgtcgtcggctccgagctcatacaaaagtacttgggcgacggaccaaagttggtgcgcgaattgttccgcgttgcagaggagcacgcgccgtccatagtcttcatagacgaaattgatgcagtgggcacaaagcgttacgattccaattcaggcggcgaacgtgaaattcaacgcaccatgttggagttgctgaatcagctagacggtttcgattctcgtggtgatgtcaaagtcatcatggcaacgaatcgtattgaaacacttgatccagcgcttatacgtccgggacgtattgatcgtaagattgagttccccttgcccgatgagaagaccaagcgacgcattttcaccatacacacatcgcgcatgacactcgctgaagacgtgaacctgaatgagctaattatggcaaaggatgatctttctggtgccgatattaaggcgatttgcacagaagcaggactgatggcattgcgcgagcgtcgcatgaaggtgaccaatgaggactttaagaaatcaaaggagagcgtcttgtaccgcaagaaggaaggcacgcccgaaggactgtatttataa

SEQ ID NO: 5565 - protein, 439 aa, Drosophila mojavensis
MGQNQSAQGGTGDKKDDKDKKKKYEPPIPTRVGKKKRRAKGPDAAMKLPLVTPHTRCRLKLLKLERIKDYLMMEDEFIRNQERLKPQDEKNEEERSKVDDLRGTPMSVGNLEEIIDDNHAIVSTSVGSEHYVSILSFVDKDQLEPGCSVLLNHKVHAVVGVLSDDTDPMVTVMKLEKAPQETYADIGGLDTQIQEIKESVELPLTHPEYYEEMGIKPPKGVILYGPPGTGKTLLAKAVANQTSATFLRVVGSELIQKYLGDGPKLVRELFRVAEEHAPSIVFIDEIDAVGTKRYDSNSGGEREIQRTMLELLNQLDGFDSRGDVKVIMATNRIETLDPALIRPGRIDRKIEFPLPDEKTKRRIFTIHTSRMTLAEDVNLNELIMAKDDLSGADIKAICTEAGLMALRERRMKVTNEDFKKSKESVLYRKKEGTPEGLYL

SEQ ID NO: 5566 - DNA, 1182 bp, Drosophila mojavensis
  CDS (1)..(1182)
atggacatattcatggcagaaagacaagatgaaattgaattaaagccaaaagatgcgcacagctcgttggatgaactagatctggaagatttatatgtgcgctataagaaattgcaaaaaactttggaattcattgagtatttacatgcacaggaggaggtgaaacgtatacaatcggtgccgttggtgattggccaatttctggaagctgttgatcagaatactggaattgtcggctcgaccaccggttccaattactatgtacgcatcctctccactatcgatcgtgagcttctgaagccatctgcgtcggttgccttgcacaagcatagcaatgctttggtcgatgtcctgccaccagaagcggacagctccatatcgatgctgcagcccgacgagaagcccgatgttagctatgctgatattggtggcatggatatgcaaaagcaggagattcgagaagctgtcgagctgccgctcacccacttcgagctgtacaaacaaatcggcattgatccgccgcgtggtgtcctgatgtacggtccacccggctgcggtaaaacgatgttggccaaagctgtggcccatcatacgaccgcctcgttcatacgcgtcgtcggctccgagtttgtgcagaaatatttgggcgaaggcccgcgcatggtccgcgacgtatttcgactggccaaggagaatgcgccagccattattttcatcgatgaaatcgatgcgattgccacgaaacgtttcgatgcccagacaggcgctgatcgtgaagtgcagcgtattctgctcgagctgctgaatcaaatggatggcttcgatcaaacgaccaatgtaaaggtgattatggcaacgaatcgagccgacactctggatccagccctgttgcgaccgggtcgcttggatcgtaaaattgaattcccgttaccggatcgaagacagaaacggttggtcttctccaccatcacatcgaaaatgaacctcagcgaggatgtcgatctggaggagtttgtggcgcgtcccgataaaatctctggcgctgacatcaatgccatttgccaggaggcgggtatgcatgcggtgcgcgagaatcgttacattgtccttgccaaggacttcgagaagggttataagaacaacatcaagaaggacgagcaggagcacgagttctacaaatag

SEQ ID NO: 5567 - protein, 393 aa, Drosophila mojavensis
MDIFMAERQDEIELKPKDAHSSLDELDLEDLYVRYKKLQKTLEFIEYLHAQEEVKRIQSVPLVIGQFLEAVDQNTGIVGSTTGSNYYVRILSTIDRELLKPSASVALHKHSNALVDVLPPEADSSISMLQPDEKPDVSYADIGGMDMQKQEIREAVELPLTHFELYKQIGIDPPRGVLMYGPPGCGKTMLAKAVAHHTTASFIRVVGSEFVQKYLGEGPRMVRDVFRLAKENAPAIIFIDEIDAIATKRFDAQTGADREVQRILLELLNQMDGFDQTTNVKVIMATNRADTLDPALLRPGRLDRKIEFPLPDRRQKRLVFSTITSKMNLSEDVDLEEFVARPDKISGADINAICQEAGMHAVRENRYIVLAKDFEKGYKNNIKKDEQEHEFYK

SEQ ID NO: 5568 - DNA, 1254 bp, Drosophila persimilis
  CDS (1)..(1254)
atgggacaaaaccaatcggcccaagggggctctggcgacaagaaggatgataaagacaaaaagaagaagtacgagccaccaattccgactcgcgtcggcaagaagaagcgccgcgcaaagggacccgatgcggccatgaagctgcccctggtgacgccccatacgcgttgccggctcaagctgctcaaactggagcgcatcaaagattacctgatgatggaggatgagtttattcgcaaccaggagcgtttgaagccccaagacgagaaaaacgaggaggagcgctccaaggtggatgacctgcgcggcacaccaatgtctgtgggtaatctggaggagattatcgatgataatcacgcaattgtgtccacctctgtgggctccgagcactacttcacgccggttgtggggtggtcctcagttgacgacaccgatcctatggtcactgtaatgaagctggagaaggcaccacaggaaacctatgcagacattggtggcctggacactcagattcaggaaatcaaagagtctgtcgagctgccgctaacgcatcccgaatactacgaggaaatgggcatcaagcctccaaagggtgtcatcctctatggcccaccaggcacaggcaagactctccttgccaaggctgtggccaatcaaacctcggccacgtttcttcgcgttgtgggctcggaacttatacaaaagtatctgggcgatggccccaagctggtgcgggaactgttccgtgtggccgaggagcatgcaccgtctatagtgtttatcgacgaaatcgatgctgtcggcaccaagcgctacgactcgaactctggtggcgagcgtgagatccagagaactatgttggagctgctcaatcagttggatggctttgattcgcgcggcgatgtgaaggtaataatggctacgaatcgcattgagacgctcgacccggcgcttatacgtccgggacgtatcgatcgtaagatcgaatttccactgcccgacgagaagacaaagcgacgcattttcaccatacacacgtctcgcatgaccctggccgaagatgtgaacctcagcgaactgatcatggccaaggatgatctctccggcgccgacatcaaggctatttgcacagaagctggtctcatggcactgcgcgagcgccgcatgaaggtgaccaacgaggacttcaagaaatcaaaggagagcgtcttgtaccgaaagaaggagggcacacccgagggattgtatttataa

SEQ ID NO: 5569 - protein, 417 aa, Drosophila persimilis
MGQNQSAQGGSGDKKDDKDKKKKYEPPIPTRVGKKKRRAKGPDAAMKLPLVTPHTRCRLKLLKLERIKDYLMMEDEFIRNQERLKPQDEKNEEERSKVDDLRGTPMSVGNLEEIIDDNHAIVSTSVGSEHYFTPVVGWSSVDDTDPMVTVMKLEKAPQETYADIGGLDTQIQEIKESVELPLTHPEYYEEMGIKPPKGVILYGPPGTGKTLLAKAVANQTSATFLRVVGSELIQKYLGDGPKLVRELFRVAEEHAPSIVFIDEIDAVGTKRYDSNSGGEREIQRTMLELLNQLDGFDSRGDVKVIMATNRIETLDPALIRPGRIDRKIEFPLPDEKTKRRIFTIHTSRMTLAEDVNLSELIMAKDDLSGADIKAICTEAGLMALRERRMKVTNEDFKKSKESVLYRKKEGTPEGLYL

SEQ ID NO: 5570 - DNA, 1161 bp, Drosophila persimilis
  CDS (1)..(1161)
atgaaagacctcgcattgtttcacaacaagaatttgcaaaattacgcaggtttagaaatcaaggatctgtatgtgatatacaagaaactgcagatggagttggagcttattcaggaattcatacacgcccaggaggaggtgaagcgtataaaagcagtacccttggttattggccagtttctagagccagttgatgcaaacaatggcatcgtagcttctaccactggctcaaactactatgtccgtgttctgtccaccattgacagagagcaactcaagccgtcggcatcggtggccctccacaagcagagcaactgtttggtggatttggtgccgccagaggcagacagcaccatctctatgctatcggcggatgagaagcccgatgtgagctactcggacattggtggtctcgacatgcagaagcaagagattcgcgaggcggttgagctgccactcacgcatgctcatctttataagcaaattggcattgaccctcctcgtggcgtcctactttacggcccgccgggatgcggcaagaccatgctggccaaggctgtggcacaccacacaaccgccaactttataagtgttgtgggctcggagtttgttcagaagtacttgggcgaggggccgcgtatggtgcgcgaccttttccgcctggcaaagcagaattctccgtcggtcatctttattgatgaaatcgatgccatcgccaccaagcgctttgacgcacaaacgggcgcagatcgcgaagttcagcgcatactgctagagcttctcaaccaaatggacggcttcgatgaaacaaccaacgttaaggtgattatggccactaaccgggctgacactctagatccggctctgctccgtccggggcgcatggaccgtaagatagagtttcccttgccagatcgtcgtcagaagcgtttggtcttcacgaccataacctccaaaatgaatctgggggaggacattgacttggaggacataatagcacgtcccgacaagatatccaacgcagacattaatgccatatgccaggaggccggcatgcatgccgttcgtgagaatcgttatgtcgtcaatgcaaaggatttggaaaaaggctacaaagcaagcgtgcgcaaggatgaggcccagcacgagttttacaattaa

SEQ ID NO: 5571 - protein, 386 aa, Drosophila persimilis
MKDLALFHNKNLQNYAGLEIKDLYVIYKKLQMELELIQEFIHAQEEVKRIKAVPLVIGQFLEPVDANNGIVASTTGSNYYVRVLSTIDREQLKPSASVALHKQSNCLVDLVPPEADSTISMLSADEKPDVSYSDIGGLDMQKQEIREAVELPLTHAHLYKQIGIDPPRGVLLYGPPGCGKTMLAKAVAHHTTANFISVVGSEFVQKYLGEGPRMVRDLFRLAKQNSPSVIFIDEIDAIATKRFDAQTGADREVQRILLELLNQMDGFDETTNVKVIMATNRADTLDPALLRPGRMDRKIEFPLPDRRQKRLVFTTITSKMNLGEDIDLEDIIARPDKISNADINAICQEAGMHAVRENRYVVNAKDLEKGYKASVRKDEAQHEFYN

SEQ ID NO: 5572 - DNA, 1170 bp, Drosophila sechellia
  CDS (1)..(1170)
atgcgtttgttaaaggaggaaattgcccagtttcacgagcagtcgctggagaagtacgatggactggatccgcatgatctgtatgtactgtacaagaagcttcagatggagctggagctcatccagttcatacacgcccaggaggaagtgaagcgcataaaggccgtgccactagtcattggtcagtttctggaggcagtggatgaaaacaacggcatagtggcctccaccaccggctccaattactacgttcgagtgctatccaccattgacagggagcaactgaagccgtcctcttcggttgggctgcacaagcagagcaattgtctggtcgatttggtgccaccggaggcggacagcacaatatcgatgctatcaccggatgagaaaccggatattagctactcggacattggtggcctggatatccagaaacaggaggtacgcgaggctgtcgagctgcccttgacccacgcccagttgtacaagcagattggcattgatcccccgcgcggcgtcctcctttttggaccacctggatgtggcaaaaccatgctggccaaggcggtggcccatcacacaactgcatcctttattcgtgtcgtgggctccgagttcgtccagaaatacctaggcgaggggccgcgcatggtgcgagatattttccgcctggccaagcagaattctccttcaattatcttcattgatgaaatcgacgcgattgccaccaagcgtttcgatgcacagacaggtgcggatcgcgaggtgcagcgcattctgctggaactactcaaccaaatggatggctttgatgagaccaccaacattaaagttatcatggccaccaatcgtgcagataccttagatccggctctattacgacccggccgtttggatcggaaaattgagttaccattgccggatcgtcgccaaaagcgcttagttttcaacacaatcacctcgaaaatgaatgtgggagaggatgtggacctagaggacatcattgcacgtccggacaagatctccaatgcggatataaatgccatttgccaagaggctggaatgcatgcagtgcgcgagaatcgctatgtggtcaacgccaaggatttcgaaaagggttataagaccagcgtgcgcaaggacgaagctcagcatgagttctatagctag

SEQ ID NO: 5573 - protein, 389 aa, Drosophila sechellia
MRLLKEEIAQFHEQSLEKYDGLDPHDLYVLYKKLQMELELIQFIHAQEEVKRIKAVPLVIGQFLEAVDENNGIVASTTGSNYYVRVLSTIDREQLKPSSSVGLHKQSNCLVDLVPPEADSTISMLSPDEKPDISYSDIGGLDIQKQEVREAVELPLTHAQLYKQIGIDPPRGVLLFGPPGCGKTMLAKAVAHHTTASFIRVVGSEFVQKYLGEGPRMVRDIFRLAKQNSPSIIFIDEIDAIATKRFDAQTGADREVQRILLELLNQMDGFDETTNIKVIMATNRADTLDPALLRPGRLDRKIELPLPDRRQKRLVFNTITSKMNVGEDVDLEDIIARPDKISNADINAICQEAGMHAVRENRYVVNAKDFEKGYKTSVRKDEAQHEFYS

SEQ ID NO: 5574 - DNA, 1335 bp, Drosophila virilis
  CDS (1)..(1335)
atgtccttcctctttgtgggtcaaaaccaatcggcacaaggtggaactggagacaagaaggatgacaaagacaaaaagaagaaatatgagccaccaattccgactcgtgttggcaaaaagaagcgtcgcgcaaagggtcccgatgcggccatgaagctgccgcaagtgacgccccatacacggtgccgtctaaagttgctgaaattggagcgcattaaggattaccttatgatggaggatgagtttatacgcaatcaggagcgcctgaagccacaagacgagaagaacgaggaagaacgttccaaggtggatgacttgcgtggcacaccaatgtctgtgggcaatctagaggagattatcgatgacaaccatgccattgtgtcgacatccgtgggttccgagcactacgtcagcattctgtcctttgtcgacaaggaccaattggagcctggttgctctgtcctcttgaatcacaaggttcatgctgtcgtgggtgttctaagtgacgacacagatcccatggtcacggttatgaagctggagaaagcgccacaggaaacctatgcggacattggtggtctggacacgcaaatacaagaaatcaaagagtctgtcgagcttccgctaacgcatcccgaatactacgaggaaatgggcattaaaccacctaagggcgtcattctttatggtcctcccggcactggtaaaactcttctcgctaaggctgttgccaatcaaacttctgcgactttcttgcgcgttgtcggctcagagcttatacaaaagtacttgggagatggtcccaagttggtgcgagagctgttccgcgtggccgaggagcatgcgccgtctattgtatttattgatgaaatcgatgctgttggcacgaagcgttatgactccaactcgggcggagaacgcgaaattcagcgcaccatgttggagttactcaatcagctcgatggttttgattctcgcggagatgttaaagttatcatggcaacgaatcggattgaaacgctggatccggcgcttatacgtccgggacgtattgatcgtaagattgagttcccactgcccgatgagaagaccaagcgacgcattttcaccatacacacctcgcgcatgacgctcgctgaggatgtgaacttgaatgagctaattatggccaaggatgatctatctggcgctgatattaaggctatttgcacagaagctggtctaatggcattgcgcgagcgccgcatgaaagtgaccaatgaggactttaaaaaatcaaaggagagtgttttgtaccgcaagaaggaaggcacgcccgagggattgtatttataa

SEQ ID NO: 5575 - protein, 444 aa, Drosophila virilis
MSFLFVGQNQSAQGGTGDKKDDKDKKKKYEPPIPTRVGKKKRRAKGPDAAMKLPQVTPHTRCRLKLLKLERIKDYLMMEDEFIRNQERLKPQDEKNEEERSKVDDLRGTPMSVGNLEEIIDDNHAIVSTSVGSEHYVSILSFVDKDQLEPGCSVLLNHKVHAVVGVLSDDTDPMVTVMKLEKAPQETYADIGGLDTQIQEIKESVELPLTHPEYYEEMGIKPPKGVILYGPPGTGKTLLAKAVANQTSATFLRVVGSELIQKYLGDGPKLVRELFRVAEEHAPSIVFIDEIDAVGTKRYDSNSGGEREIQRTMLELLNQLDGFDSRGDVKVIMATNRIETLDPALIRPGRIDRKIEFPLPDEKTKRRIFTIHTSRMTLAEDVNLNELIMAKDDLSGADIKAICTEAGLMALRERRMKVTNEDFKKSKESVLYRKKEGTPEGLYL

SEQ ID NO: 5576 - DNA, 1155 bp, Drosophila virilis
  CDS (1)..(1155)
atgttagtgtccaaagacgacaatatggaaaacgtagagccaaaaatcttggatgagagtgactgctatgtagtgtataagaaattacagctgcagctggaattgctgcaatacctacatgctcaggaagaggttaagcgggccaaggctgtgcccctggttattggccagtttttggaggcagttgatgaaaacaccggaattgtcgcctcaaccactggctcaaattactatgtgcgcgtgctgtccacaattgatagagagcagctcaagccgtcggcttctgtggcattgcataaacagagcaactgtttggtagacttggtgccaccggaggcggatagcaccatatccatgctgtcaccggaagagaaacctgacgtcagctatgcggacatcggcggacttgatatgcaaaagcaagaaatacgcgaggctgtcgagctgccgttgacccacgctcatttgtacaagcaaattggcattgacccaccacgcggcgtactactctatggccctcctggttgcggcaagactatgctggccaaagcggttgctaatcagacgacagccgctttcattcgcgtcgtcggctcggagttcgtgcagaagtacttgggcgagggaccacgtatggtgcgtgatctgttccggctggccaaacagaatgcgccatcggtgatattcattgatgaaatcgatgctattgccacgaaacgctttgacgctcagacaggcgccgatcgtgaggttcagcgcattttgctggagcttttgaatcaaatggatggcttcgatgaaacaaccaacattaaggttattatggcaactaatcgcgcggataccttagatccggctctactgcgtcctggacgcttggatcgtaagatcgagttcccgttgccagatcgccgtcaaaagcgtttggtttttaccaccataactgccaaaatgaatctcgccgaagatgtggatctggaggagcttattgctcgcccggacagaatttcgaatgctgacattaacgcgatttgccaggaagctggaatgcatgcagttcgtgaaaatcgttatatcgcacacgctaaggactttgaaaaaggctacaagaccagcgtgcgcaaggatgaggctcagcacgaattttataattga

SEQ ID NO: 5577 - protein, 384 aa, Drosophila virilis
MLVSKDDNMENVEPKILDESDCYVVYKKLQLQLELLQYLHAQEEVKRAKAVPLVIGQFLEAVDENTGIVASTTGSNYYVRVLSTIDREQLKPSASVALHKQSNCLVDLVPPEADSTISMLSPEEKPDVSYADIGGLDMQKQEIREAVELPLTHAHLYKQIGIDPPRGVLLYGPPGCGKTMLAKAVANQTTAAFIRVVGSEFVQKYLGEGPRMVRDLFRLAKQNAPSVIFIDEIDAIATKRFDAQTGADREVQRILLELLNQMDGFDETTNIKVIMATNRADTLDPALLRPGRLDRKIEFPLPDRRQKRLVFTTITAKMNLAEDVDLEELIARPDRISNADINAICQEAGMHAVRENRYIAHAKDFEKGYKTSVRKDEAQHEFYN

SEQ ID NO: 5578 - DNA, 1227 bp, Drosophila virilis
  CDS (1)..(1227)
atggatatattgatgcctgaaagagacgagcttgatttgaagctgaaagatgcgcatagctccctggatgaattggacatagacgatttgtatgtgcgttataagaaattgcaaaaaacattggaattcattgaggtgcaggaggagtatatcaaggatgagcagcgcaatctgaagaaggagtacttgcacgcacaggaggaggtgaagcgtatacagtcggtgccgctagtgattgggcaattcctcgaagctgttgatcagaatacgggcatcgtgggctccacgacgggctctaattactatgtacgcatcctgtccaccatcgaccgtgagttgcttaagccctcggcctcggtggcgctgcacaagcatagcaatgccctggtcgatgtgctgccaccagaggccgatagctccatatccatgctgcagccggatgagaagccagatgttagctatgccgacatcggcggcatggatatgcaaaaacaggaaatacgcgaagcagtcgagctgccgctaacccactttgagctgtacaaacagattggcatcgatccgccacgcggcgtactcatgtacggtccgcccggctgcggaaaaaccatgctggccaaggccgtggcacatcatacgaccgcctcgtttatacgcgtcgttggctccgagtttgttcagaaatatctgggcgagggaccccgcatggtgcgcgatgtcttccgtttggccaaggagaatgcgccggctattattttcattgatgaaatcgatgcgattgccacgaaacgtttcgatgcccaaactggcgctgatcgcgaggtgcagcgcattctgctggagctgctcaatcaaatggacggcttcgatcagacaaccaatgtgaaggtcatcatggcgaccaatcgtgccgatacgctcgatccggcactgttgcgtcccggtcgcttggatcgtaaaattgagttcccattgcccgatcgtcgccagaaacgtttggtattcacaaccatcacatccaagatgaatctcagcgaggatgtggatctggaggagtttgtcgccaggcccgacaagatatctggtgccgatattaatgccatttgccaggaggctggcatgcatgctgtacgcgagaatcgttacatcgttctggccaaggacttcgagaagggctacaagaacaacatcaagaaggacgaacaggagcacgagttctacaaatag

SEQ ID NO: 5579 - protein, 408 aa, Drosophila virilis
MDILMPERDELDLKLKDAHSSLDELDIDDLYVRYKKLQKTLEFIEVQEEYIKDEQRNLKKEYLHAQEEVKRIQSVPLVIGQFLEAVDQNTGIVGSTTGSNYYVRILSTIDRELLKPSASVALHKHSNALVDVLPPEADSSISMLQPDEKPDVSYADIGGMDMQKQEIREAVELPLTHFELYKQIGIDPPRGVLMYGPPGCGKTMLAKAVAHHTTASFIRVVGSEFVQKYLGEGPRMVRDVFRLAKENAPAIIFIDEIDAIATKRFDAQTGADREVQRILLELLNQMDGFDQTTNVKVIMATNRADTLDPALLRPGRLDRKIEFPLPDRRQKRLVFTTITSKMNLSEDVDLEEFVARPDKISGADINAICQEAGMHAVRENRYIVLAKDFEKGYKNNIKKDEQEHEFYK

SEQ ID NO: 5580 - DNA, 1242 bp, Drosophila willistoni
  CDS (1)..(1242)
atgccctacaatatggacgttcttatgcccgagaaggacgaacttagcgaactgaagctaaaggatgcccatagctcactggatgagctagatatggatgatttatatgtacgatataagaaacttcagaaaacattagagtttatcgaagtgcaggaagagtacatcaaggatgagcagcgcaatttgaaaaaggaatatctgcacgcgcaagaagaggtgaagaggatacagagtgtacctttggtgattggacaattccttgaggcagttgatcaaaacactggcattgttggctccaccacaggctccaattactatgtacgcatcctatcaaccattgatcgtgagctgttgaagccttcggcttccgttgcactgcataagcacagtaatgccctggtcgatgtcctgccaccagaggcggatagttccatttcaatgctacaacccgatgagaagcccgatgttagttatgcagatatcggtggcatggatatgcagaaacaggagatacgagaggccgtcgaactgcccctaacccactttgagctgtacaaacagattggtattgatccacctcgaggtgttctcatgtacggaccaccgggctgcggcaaaactatgctggccaaggcagtggcccatcacacaactgcctcctttatcagggttgtgggctccgaatttgttcagaaatatctgggcgagggaccgcgtatggtgcgcgatgtcttccgcttggccaaagagaatgcaccggctataattttcatcgatgagatcgatgccattgccacaaagcgattcgatgcccaaaccggagctgatcgtgaggtccaacgtattcttctggagctgctcaatcaaatggatggtttcgatcagacgaccaatgttaaggtgattatggccaccaatcgtgccgataccctagatccggctctattgcgtcccggacgtcttgatcgtaaaattgaatttccgcttccggatcgacgacagaaacgtcttgtcttctccaccatcacatcgaaaatgaaccttagcgaggatgttgatttggaagagtttgtggcgcgacccgacaaaatttctggtgcagatattaatgcaatttgtcaagaagctggcatgcatgcggtccgtgagaatcgttatattgtcctggccaaggactttgagaagggctataagaataatatcaagaaggacgaacaggagcacgaattctataaatag

SEQ ID NO: 5581 - protein, 413 aa, Drosophila willistoni
MPYNMDVLMPEKDELSELKLKDAHSSLDELDMDDLYVRYKKLQKTLEFIEVQEEYIKDEQRNLKKEYLHAQEEVKRIQSVPLVIGQFLEAVDQNTGIVGSTTGSNYYVRILSTIDRELLKPSASVALHKHSNALVDVLPPEADSSISMLQPDEKPDVSYADIGGMDMQKQEIREAVELPLTHFELYKQIGIDPPRGVLMYGPPGCGKTMLAKAVAHHTTASFIRVVGSEFVQKYLGEGPRMVRDVFRLAKENAPAIIFIDEIDAIATKRFDAQTGADREVQRILLELLNQMDGFDQTTNVKVIMATNRADTLDPALLRPGRLDRKIEFPLPDRRQKRLVFSTITSKMNLSEDVDLEEFVARPDKISGADINAICQEAGMHAVRENRYIVLAKDFEKGYKNNIKKDEQEHEFYK

SEQ ID NO: 5582 - DNA, 1242 bp, Drosophila yakuba
  CDS (1)..(1242)
atgccgtacaacatggacgtactgatgccggagaaggatgagctctccgacttgaagccgaaagatgcgcacagttccctggacgagctggacatggaggatctctatgtgcgctacaagaaactgcaaaagaccctagagttcattgaggtgcaggaggagtacatcaaggatgagcagcggaacctgaagaaggagtaccttcacgcccaggaggaggtgaagcgcattcagtcggtgccactggtcattggccagttcctggaggccgtcgatcagaacacgggtattgtgggttccaccaccggttccaattactatgtgcgcatcctgtccaccatcgatcgggagctgctgaagccctccgcctccgtggccctgcacaagcacagcaacgccctggtggacgtgctgccgccagaggcggatagctccatttcgatgctgcagccggatgagaagcccgatgttagctatgcggacattggtggcatggacatgcagaagcaggagatccgtgaggcagtcgaactgcccctcacccacttcgagctttacaagcagatcggcattgatccgccccgcggtgtgctcatgtacggtccgcccggatgcggcaagaccatgttggccaaggcggtggcccaccacacaacggcctcgttcatacgcgtggtcggctcggaattcgtgcagaagtacctcggcgagggaccgcgcatggtgcgcgacgtgtttaggctggccaaggagaatgcaccggccatcatcttcattgacgagatcgacgccattgccacgaagcgtttcgatgcgcagacgggcgccgatcgtgaggtgcagcgcatcctgctggagctgctgaaccagatggacggcttcgatcagaccaccaacgttaaggtgatcatggccaccaacagggctgacacactggatcccgctctgctgcgacctggtcgattggatcgtaagattgagttcccgctgcccgatcgccggcaaaagcgactcgtcttctccaccatcacctcaaagatgaacctcagcgaggacgtcgatttggaggagtttgtggcgcggccggacaagatctctggcgccgacatcaacgccatttgccaggaggcgggcatgcacgcggtgcgtgagaatcgctacatcgttttggccaaggacttcgagaagggctacaagaacaacatcaagaaggacgagcaggagcacgagttctacaaatag

SEQ ID NO: 5583 - protein, 413 aa, Drosophila yakuba
MPYNMDVLMPEKDELSDLKPKDAHSSLDELDMEDLYVRYKKLQKTLEFIEVQEEYIKDEQRNLKKEYLHAQEEVKRIQSVPLVIGQFLEAVDQNTGIVGSTTGSNYYVRILSTIDRELLKPSASVALHKHSNALVDVLPPEADSSISMLQPDEKPDVSYADIGGMDMQKQEIREAVELPLTHFELYKQIGIDPPRGVLMYGPPGCGKTMLAKAVAHHTTASFIRVVGSEFVQKYLGEGPRMVRDVFRLAKENAPAIIFIDEIDAIATKRFDAQTGADREVQRILLELLNQMDGFDQTTNVKVIMATNRADTLDPALLRPGRLDRKIEFPLPDRRQKRLVFSTITSKMNLSEDVDLEEFVARPDKISGADINAICQEAGMHAVRENRYIVLAKDFEKGYKNNIKKDEQEHEFYK

SEQ ID NO: 5584 - DNA, 1242 bp, Trichoplax adhaerens
  CDS (1)..(1242)
atgcccacaagaattggtaaaaagaagagaaaatcacgaggacctgaagctgctactaaagttcctctagttactccacatacaaaatgccgcttaaaattgttaaagttaaatcgcattagagactatctcatcatggaaagtgaatttatagagaatcaagagcagcttagaccgcaagatgaaaaaaatgaggaggaaagaacaagattggatgacattagagggacgccaatggcagtcggaaccttagaagagattatcgatgacaatcacgctatagtttcaacatctgttggatctgagcattacgttagcattttatcatttgttgaccgagatttactggaacctggttgttctgttttactcaatcataaggttcatgcagttattggtgtactgcaagacgataccgatccaatggtttctgttatgaagctggagaaggctccgcaagagtcgtatgccgatattggaggtttggaatcccagattcaggaaattaaggaatcggttgagctgcctttgactcatccagaatattatgaagagatgggcattaaacctcctaaaggggttatattatacggggcgcctggcacaggcaaaacattgctggcaaaagctgttgctaatcagacctcagctacattcttacgtgtggtaggatctgaactgattcaaaaatatctaggtgatggtccaaagcttgttagagaattgtttcgagtagccgaagaacatgctccttctatcatttttattgatgaaatagacgctattggcacaaaacgtagatacgattcaaacagcggaggcgaacgtgagattcagaggaccatgttagaactattgaatcagttagatggttttgactcaataggcgatgttaaagtgattatggctacaaataggattgaaagcttagatcctgctctcattaggcctgggcgaattgatcgaaaaattgaatttccgttaccggatgagaagacgagaagaagaatttttaatattcatacagcccgaatgactttagcagaagatgtcaacttggaagaacatattatggctaaggatgacctatcgggagctgatgttaaggctatttgcactgaagctggtttattggccttacgagagcgtcgaatgaaagtaactagcgaagatttccgaaaatctaaggataacgtgttataccgcaaaaaggaaggaacaccagaaggactctacttgtaa

SEQ ID NO: 5585 - protein, 413 aa, Trichoplax adhaerens
MPTRIGKKKRKSRGPEAATKVPLVTPHTKCRLKLLKLNRIRDYLIMESEFIENQEQLRPQDEKNEEERTRLDDIRGTPMAVGTLEEIIDDNHAIVSTSVGSEHYVSILSFVDRDLLEPGCSVLLNHKVHAVIGVLQDDTDPMVSVMKLEKAPQESYADIGGLESQIQEIKESVELPLTHPEYYEEMGIKPPKGVILYGAPGTGKTLLAKAVANQTSATFLRVVGSELIQKYLGDGPKLVRELFRVAEEHAPSIIFIDEIDAIGTKRRYDSNSGGEREIQRTMLELLNQLDGFDSIGDVKVIMATNRIESLDPALIRPGRIDRKIEFPLPDEKTRRRIFNIHTARMTLAEDVNLEEHIMAKDDLSGADVKAICTEAGLLALRERRMKVTSEDFRKSKDNVLYRKKEGTPEGLYL

SEQ ID NO: 5586 - DNA, 1332 bp, Ciona intestinalis
  CDS (1)..(1332)
atgggccaaaatcaaagtgggggaggccggaatggtgccggggataacaagaaaggggacaaggggaaagagaaaaagaaatatgaacgacctctgccgacaagagttggtaaacgtagaaagaaggcaaaaggaccagatgccgctaacaagttgcccagtgtaactcctcatacccggtgtcggcttcgtcttttaaaacaagaacgcatcaaggattatcttttaatggaggaggaatacatcaggaaccaggagcgcctcaagccacaagaagaaaagcaagaggaagaacgcacaaaagtcgatgatttgagaggttctcccatgtcggttggaacgctggaggaaattatcgatgaaaatcacgccattgtttcaacttctgtgggatccgaacattacgttagcatcttgtcgtttgttgacaaagatttgctggaaccaggatgtacagtgctcatgaatcataaggtccacgcagttgttggtttcctcggagatgatgttgatcctctcgtgaccgtgatgaaacttgaaaaagctccgaaagaatcatacgctgatatcggggggctggatacacagattactgaaataaaggaatctgtggagctgccattaacccaccccgagtattacgaagaaatggggattaaacctcctaaaggtgtgatcttgtatggaccccctggaaccggtaaaacattgctagcgaaagctgtagccaaccaaacatcggcgacctttctacgtgtggttgggtcagagttgatacagaaatacctcggtgacggacctaaacttgtgagggaattattccgtgtggcagaggagcatgcgccatccattgtgtttattgatgagattgatgccattggtactaagagatacgaatctaactctggtggtgaacgtgagatacagcgtacgatgttagagttattgaaccaacttgatggttttgactcgaggggcgatgttaaagtcatcatggcgacgaacagaattgactcgctcgacccagcgctgatcagagcaggtcgaattgatcgaaagattgagttcccgatgccggatgagaagacaaagcgtcgtatattcaatatacatacagctcgtatgacgctttccgacgatgttaatgtggacgaacatgttcaagccaaagatgatttatccggggccgatatcaaggcaatttgcaccgaggcgggtttacttgcattgagagaacgtagaatgaaagtcacgagtgaagatttcaaaaagtccaaggaaaatgttctttaccgaaagaatgagggcgccccacaaggattatatttataa

SEQ ID NO: 5587 - protein, 443 aa, Ciona intestinalis
MGQNQSGGGRNGAGDNKKGDKGKEKKKYERPLPTRVGKRRKKAKGPDAANKLPSVTPHTRCRLRLLKQERIKDYLLMEEEYIRNQERLKPQEEKQEEERTKVDDLRGSPMSVGTLEEIIDENHAIVSTSVGSEHYVSILSFVDKDLLEPGCTVLMNHKVHAVVGFLGDDVDPLVTVMKLEKAPKESYADIGGLDTQITEIKESVELPLTHPEYYEEMGIKPPKGVILYGPPGTGKTLLAKAVANQTSATFLRVVGSELIQKYLGDGPKLVRELFRVAEEHAPSIVFIDEIDAIGTKRYESNSGGEREIQRTMLELLNQLDGFDSRGDVKVIMATNRIDSLDPALIRAGRIDRKIEFPMPDEKTKRRIFNIHTARMTLSDDVNVDEHVQAKDDLSGADIKAICTEAGLLALRERRMKVTSEDFKKSKENVLYRKNEGAPQGLYL

SEQ ID NO: 5588 - DNA, 1251 bp, Ciona intestinalis
  CDS (1)..(1251)
atggaggaattaggaatagcaacaaaacctgctatcgtcacgccagaatcatcccgtcctggcactgttcaatctatgcttagcacgactgaaatagacaagatagaagatctttatacgaaatacaagaagctgcaaaaacaactggagtttctcggagtacaagaagaatatattaaagatgaaatgaagaacttgaggaaggaatatttgcatgctcaggaagaagtgaaacgcatacagagtattcctgttgtgattggtcaattcttggaagcagtggaccagaacaatgcaattgttctttcaacaaccggatcaaattattatgtccgaatattaagcacaattgatagagaacttttgaaaccgaactcttcagtggctcttcacaaacatagtaacgcacttgtggatgtcctccctcctgaagcagacagcagtatcactatgctttctgcagatgagaaacctgatgtgtcttattctgatattggtggaatggacatccagaaacaagaagttaaagaagctgttgaacttccgttgacacatttcgagctttataaacagattggaattgaccctcctcgtggagtcttgatgttcggacctcctggttgtggaaagacaatgttggcaaaagctgtcgcccaccataccactgcttcatttattcgagtcgttggatcggaattcgtgcagaaatatctgggtgaaggaccaaggatggtacgggatgtgttcagacttgccaaagagaactcccctgccattatcttcattgatgaaatagatgcgatcgccacgaagcgttttgacgctcaaactggtgcagatcgtgaggtgcaacgtatcttgctggaactacttaaccagatggatggcttcgatcaaactgttaatgttaaggttattatggccaccaaccgagctgacacgctcgatcctgctctgctgcgtcctggtcgtctggatcggaagattgaattcccgcttccggatcggagacagaagcgtctcgtcttctccaccattactgggaagatgaacctcagcgatgaagtggatttggaagattatgttgccagacctgacaaaatcactggtgctgatataaatgcaatttgccaagaagcaggcatgcttgcagttcgtgaaaaccggtatgtcgttctttccaaagatttcgagaaggcttacaaaacacagatgaagaaagacgagcaagaaatggaattttacaaatga

SEQ ID NO: 5589 - protein, 416 aa, Ciona intestinalis
MEELGIATKPAIVTPESSRPGTVQSMLSTTEIDKIEDLYTKYKKLQKQLEFLGVQEEYIKDEMKNLRKEYLHAQEEVKRIQSIPVVIGQFLEAVDQNNAIVLSTTGSNYYVRILSTIDRELLKPNSSVALHKHSNALVDVLPPEADSSITMLSADEKPDVSYSDIGGMDIQKQEVKEAVELPLTHFELYKQIGIDPPRGVLMFGPPGCGKTMLAKAVAHHTTASFIRVVGSEFVQKYLGEGPRMVRDVFRLAKENSPAIIFIDEIDAIATKRFDAQTGADREVQRILLELLNQMDGFDQTVNVKVIMATNRADTLDPALLRPGRLDRKIEFPLPDRRQKRLVFSTITGKMNLSDEVDLEDYVARPDKITGADINAICQEAGMLAVRENRYVVLSKDFEKAYKTQMKKDEQEMEFYK

SEQ ID NO: 5590 - DNA, 1188 bp, Hydra magnipapillata
  CDS (1)..(1188)
atgacatcaaatttattagctcaaaacacagatcctgacacagacgatctttatatcaagtacaaaaagcttcaaaagcaacttgagtttcttgaagttcaagaagaatacattaaagatgaacaaaaaaatcttaaaaaggagtatttacatgctcaggaagaagttaaaagaatacaatctgtacctcttgttattgggcaatttctagaagctattgatcaaaatactggaattgtaggttcaacaacaggttccaattattatgtaaggatattaagtacaatcgatagagagctgttaaaaccaaattcttctgttgctcttcacaagcattccaatgcacttgttgatatacttccacctgaagctgatagcagtattgctatgttacaagcagatgaaaaaccagaagtttcatatgctgatattggtggtatggatattcaaaagcaagaaatgcgtgaagctgttgagctgcctttaacacattttcaactttataaacaaattggtattgaccccccacgtggtgtcctaatgtatggcccacctggttgtggtaaaacaatgttagctaaagctgttgctcatcatactactgctgcttttataagagttgtaggatcggaatttgtacaaaagtatttgggtgaaggtccacgcatggttagagatgttttcagactagcaaaagaaaatgcacctgctattattttcattgatgaaattgatgccattgcaactaaaaggtttgatgcacagacaggagctgatagagaagttcaaagaattttattagaacttttaaatcaaatggatggttttgatcaaaatgttaatgtcaaggtgattatggcaacaaatagagctgatactttagatcctgcactattacgacctggtcgattagatcgtaaaattgaatttcctatgcctgatcgtcgtcagaaaagacttatattttcaacaataactgcaaaaatgaatttatctgatgaagttgatttagaagattatattgctcgtccagataaaatctctggagcagatatcaatgctattgtacaggaggctggaatgcaagctgttcgcgaaaacagatatgtggttttagcgaaagactttgaaaaagggtataaaagcaacattaaaaaagacgaacaggaacatgatttttataaatag

SEQ ID NO: 5591 - protein, 395 aa, Hydra magnipapillata
MTSNLLAQNTDPDTDDLYIKYKKLQKQLEFLEVQEEYIKDEQKNLKKEYLHAQEEVKRIQSVPLVIGQFLEAIDQNTGIVGSTTGSNYYVRILSTIDRELLKPNSSVALHKHSNALVDILPPEADSSIAMLQADEKPEVSYADIGGMDIQKQEMREAVELPLTHFQLYKQIGIDPPRGVLMYGPPGCGKTMLAKAVAHHTTAAFIRVVGSEFVQKYLGEGPRMVRDVFRLAKENAPAIIFIDEIDAIATKRFDAQTGADREVQRILLELLNQMDGFDQNVNVKVIMATNRADTLDPALLRPGRLDRKIEFPMPDRRQKRLIFSTITAKMNLSDEVDLEDYIARPDKISGADINAIVQEAGMQAVRENRYVVLAKDFEKGYKSNIKKDEQEHDFYK

SEQ ID NO: 5592 - DNA, 1287 bp, Hydra magnipapillata
  CDS (1)..(1287)
atgactacgcttgaagacaaagaaatctggaaggatgcagaagaaggattaggtgctgaagttttaagaatgggaaatgatgaactaattagtagaacaagattattagacaatgaaattaaaattatgaaaagcgaaatcttacgtgtatcacatgaacaacatgctatgaaagaaaaaattaaagaaaatgttgagaaaataaaagttaataaaactcttccttatttagtatcaaatgtagttgagattcttgatgttgatcctcaagaccaggaagagattgatggagcaaatgttgatttagattctcagagaaaaggaaaatgtgcagttgtaaaaacttcaactcgtcaaacatacttcctacctgtaattggtcttgtagaacctgaaaatcttaaaccaggagatttagtaggagtaaacaaagattcttatcttattcttgaaacgttaccatcagaatatgatgccagggtcaaagctatggaggttgatgagcgtcctactgaacagtatagtgatattggtggtcttgacgcacaaattcaagaactcatagaggctatagtactcccaatgactcacaaagagcgttttgaaaggttaggtgtatcaccacccaaaggtgttttgttatatggccctcctggcactgggaaaacactacttgctcgtgcatgtgcagctcagaccaaatcaacctttttaaaacttgcaggaccacagctagtccaaatgtttatcggtgatggtgctaaacttgtgcgagatgcatttgcacttgcaaaagagaaactccctgctattatatttatcgatgaacttgatgctattggtacaaagcgctttgatagtgagaaagcaggtgacagagaagtacaacgaactatgttagaactgctaaatcagttagatggattcagctcaacttcacaaataaaggtaatagcagcaaccaatcgagttgatattttggatcctgctttgttacgctctggtcgtctagatagaaaaatagagtttcctaatccgacagaagaagctcgtgctagaatacttcaaattcactctcgcaaaatgaacgttagtcctgaggttaattttgaagaattggcacgctgtacagacgattttaacggagcccaattaaaagcagtttgtgttgaagctggtatgatagggctgcgacgagaagccacagagcttagtcatgaagattttatggatggtatacttgaggtccaagccaagaaaaagtcaaatttggtttattacgcttaa

SEQ ID NO: 5593 - protein, 428 aa, Hydra magnipapillata
MTTLEDKEIWKDAEEGLGAEVLRMGNDELISRTRLLDNEIKIMKSEILRVSHEQHAMKEKIKENVEKIKVNKTLPYLVSNVVEILDVDPQDQEEIDGANVDLDSQRKGKCAVVKTSTRQTYFLPVIGLVEPENLKPGDLVGVNKDSYLILETLPSEYDARVKAMEVDERPTEQYSDIGGLDAQIQELIEAIVLPMTHKERFERLGVSPPKGVLLYGPPGTGKTLLARACAAQTKSTFLKLAGPQLVQMFIGDGAKLVRDAFALAKEKLPAIIFIDELDAIGTKRFDSEKAGDREVQRTMLELLNQLDGFSSTSQIKVIAATNRVDILDPALLRSGRLDRKIEFPNPTEEARARILQIHSRKMNVSPEVNFEELARCTDDFNGAQLKAVCVEAGMIGLRREATELSHEDFMDGILEVQAKKKSNLVYYA

SEQ ID NO: 5594 - DNA, 1326 bp, Hydra magnipapillata
  CDS (1)..(1326)
atgggtcaaaatcaatctggaacaggtggatcaaatcaaaataaaaaagacgataaggataaaaagaaaaaatacgaacctccaattcctactagagttggtaaaaaagctaagaaaaaaaatagaggcccagatactgcaaacaaattacctcaagtcactcctcatagaaattgcagattaaaactactgaaattagaacgtatcaaagattttcttttaatggaggaagaatttattcaaaatcaggaaagattaaagccacaggaagaaaaacatgaggaagaacgtagtaaagttgatgacttacgaggtacaccaatgtctgttggttctttagaagaaattattgatgacaatcatgctattgtgtcaacatctgtgggttcagaacattatgtaaacatcttatcttttgttgataaagatttactggaaccaggatgctctgttcttctcaatcacaaggtacatgctgttgttggagttctaggtgaagatacagatcctatggttagtgtcatgaaacttgaaaaagctcctacagaaacatatgctgatattggtggattagatacacaaatacaagagataaaggaatcagttgagttgcctttaacacaccctgagctttatgaagagatgggaatcaagccccctaaaggagtaatattgtatggagagcctggaacaggtaaaacactgcttgctaaagctgtagcaaatcaaacgtcagcaacatttttgcgtgtggttggttcagagttaattcaaaaataccttggtgatggaccaaaacttgtaagagagctgtttcgagtagcagaagaacactcaccatctattgttttcattgatgaaatagatgctgtaggaaccaaaaggtatgattcaaactcaggaggcgaacgcgagattcagcgaacaatgttagaacttcttaatcagttagatgggtttgattcaagaggagatgttaaggtaattatggctaccaatagaatagattcacttgatccagctctcattcgtcccggacgaattgatagaaagatagagtttccacttcctgatcaaaagactaagcgacgcatatttaatattcacacagggcgaatgactttagctgatgacgttgatttagaagagtatatagtagccaaagatgatttatctggtgctgatattaaggctatatgtactgaagctggcttactggctctaagggaaagaagaatgaaagttacaaatgaggactttaagaaagcaaaagaaaatgttttatatcgtaaacaagaagggacacctgaaggattatatctttaa

SEQ ID NO: 5595 - protein, 441 aa, Hydra magnipapillata
MGQNQSGTGGSNQNKKDDKDKKKKYEPPIPTRVGKKAKKKNRGPDTANKLPQVTPHRNCRLKLLKLERIKDFLLMEEEFIQNQERLKPQEEKHEEERSKVDDLRGTPMSVGSLEEIIDDNHAIVSTSVGSEHYVNILSFVDKDLLEPGCSVLLNHKVHAVVGVLGEDTDPMVSVMKLEKAPTETYADIGGLDTQIQEIKESVELPLTHPELYEEMGIKPPKGVILYGEPGTGKTLLAKAVANQTSATFLRVVGSELIQKYLGDGPKLVRELFRVAEEHSPSIVFIDEIDAVGTKRYDSNSGGEREIQRTMLELLNQLDGFDSRGDVKVIMATNRIDSLDPALIRPGRIDRKIEFPLPDQKTKRRIFNIHTGRMTLADDVDLEEYIVAKDDLSGADIKAICTEAGLLALRERRMKVTNEDFKKAKENVLYRKQEGTPEGLYL

SEQ ID NO: 5596 - DNA, 1368 bp, Schizosaccharomyces japonicus yFS275
  CDS (1)..(1368)
atgtccattgcggtgttcgttgcaattggacaagctcaatcaggattctccaattttggagatggcgccaacaatggtaatcaaaagggacaaaagaaagagaaaccaaaatacgaacctccggtacctacgcggacaggacgtagaaaaaagagaatgcaatcgggcccagacgcggccacgaagctccctgcagttctgcctactacgcgctgccgtctgagacttttgaaaatgcaacgaattcatgaccatctcctaatggaggaagagtatgtaaaaaaccaagaacgtctcaagccccaggacgaaaagacgcaggaggaacgcaatcgggttgacgagattcgggggaccccaatgtctgtgggtacgttggaggaactaattgatgatgaccacgccattgtttcgactgctggacccgagtactatgtttccatcatgtcattcgttgataaagacatgctggagcccggctgcagcgttctcctacaccacaagactctgagtattgtcggtgtgctgcttgatgacacggaccctatgattaatgtaatgaagttggaaaaagcacccaacgaaagttatgccgacatcggtggtctcgaatctcagattcaagaaatcaaagaggccgtcgagcttcctcttacccatccagagctctacgaagaaatgggtatcaagccaccaaagggtgtcattttgtacggttctcccggtaccggtaaaacgcttcttgccaaggctgtggctaaccaaacctctgccacctttctgcgtgttgtcggctctgaacttattcaaaagtacctgggtgacggtccgcgtttagtgcgtcaactcttcaaggctgctgaggatcatgcaccttctatcgtctttattgatgaaatcgatgccatcggtaccaagcggtacgacgctcagtcgggtgccgaacgcgaaattcaacgaaccatgcttgagctgctgaaccagctcgatggttttgataccagtaaccgtgacattaaagtgatcatggctacgaaccgcattaacgatctcgatccagccctcatccgtcctggacgtattgatcgtaaaatcttgtttgaaaaccctgatgaaaacacaaaacgcaagattttcaacattcacacctctaaaatgaacctcggtgacgacgtgaatttggaggagcttatccaatgcaaagacgaactgtccggtgctgaaatcaaagccattgtttctgaagctggtttgcttgctttgcgcgaacgtcgtatgcgtgttgtgatggatgactttagacaagctcgtgaaaaggttttgaagaccaaggacgagagtggacctgtgagtggactttatctttag

SEQ ID NO: 5597 - protein, 455 aa, Schizosaccharomyces japonicus yFS275
MSIAVFVAIGQAQSGFSNFGDGANNGNQKGQKKEKPKYEPPVPTRTGRRKKRMQSGPDAATKLPAVLPTTRCRLRLLKMQRIHDHLLMEEEYVKNQERLKPQDEKTQEERNRVDEIRGTPMSVGTLEELIDDDHAIVSTAGPEYYVSIMSFVDKDMLEPGCSVLLHHKTLSIVGVLLDDTDPMINVMKLEKAPNESYADIGGLESQIQEIKEAVELPLTHPELYEEMGIKPPKGVILYGSPGTGKTLLAKAVANQTSATFLRVVGSELIQKYLGDGPRLVRQLFKAAEDHAPSIVFIDEIDAIGTKRYDAQSGAEREIQRTMLELLNQLDGFDTSNRDIKVIMATNRINDLDPALIRPGRIDRKILFENPDENTKRKIFNIHTSKMNLGDDVNLEELIQCKDELSGAEIKAIVSEAGLLALRERRMRVVMDDFRQAREKVLKTKDESGPVSGLYL

SEQ ID NO: 5598 - DNA, 1212 bp, Schizosaccharomyces japonicus yFS275
  CDS (1)..(1212)
atgacagaagtcttagtgcccacgaaagatacagagaacaaaaacctggtgcagtactatacccagaaaatccaggatgttgaggctgcaataattcggagaacacacaatcttcggcgtctagaggctcagcggaatgagcttaatgcaaaagttcgcctgttgcgcgaagaaatccaattgctacaggaacctggaagctatgtgggtgaagttgtgaagatgatgggtaaaaacaaagtcctcgtgaaagtccatccggagggaaagtacgtcgttgacattgctcccgacgttgacgttcgtgagataaagcctaatatgcgcgtcgcgttgcgtaacgactcgtaccaattgattaaggtcttgcccaacaaggtggaccctcttgtctctctcatgatggtggaaaaaattcccgactctacatattctatggttggtggtttggagaagcagattaaggagatcaaggaagtcatcgagctgcctgtcaaacaccctgagctgttcgagagtttgggtattccacagcctaagggtgtcctgctctacggtcctcctggcaccggaaaaacgttgctggctcgtgccgtcgctcaccacaccgattgtaaattcatccgggtaagcggttcagagcttgttcaaaaatatattggtgagggtagccgaatggtgcgtgaattgttcgtgatggctcgtgaacacgctccctctattattttcatggacgaaattgactccatcggctcctctcgttcagaatccggcagtggtaacggtgacagcgaagtccagcgtaccatgctcgaactcctcaaccaacttgatggtttcgaaccaacgaaaaacattaaggttattatggcatccaaccgtatcgatattctcgaccccgctctccttcgtcctggccgcattgaccgcaagattgagttccccccaccgtccgccgaagctcgtgccgagattctgcgcattcactctcgctccatgaaccttactcggggtgtcgacttgaaaagcattgccgacaagatggaaggtgccagtggtgccgagctgaagggtgtttgcacggaggccggtatgttcgcccttcgtgaacgccgtgtgcacgttacccaagacgactttgagctcgccgttgccaagattctcaacaagggcaactcgagtgaaatgagtttgcaaaagctgtttaagtag

SEQ ID NO: 5599 - protein, 403 aa, Schizosaccharomyces japonicus yFS275
MTEVLVPTKDTENKNLVQYYTQKIQDVEAAIIRRTHNLRRLEAQRNELNAKVRLLREEIQLLQEPGSYVGEVVKMMGKNKVLVKVHPEGKYVVDIAPDVDVREIKPNMRVALRNDSYQLIKVLPNKVDPLVSLMMVEKIPDSTYSMVGGLEKQIKEIKEVIELPVKHPELFESLGIPQPKGVLLYGPPGTGKTLLARAVAHHTDCKFIRVSGSELVQKYIGEGSRMVRELFVMAREHAPSIIFMDEIDSIGSSRSESGSGNGDSEVQRTMLELLNQLDGFEPTKNIKVIMASNRIDILDPALLRPGRIDRKIEFPPPSAEARAEILRIHSRSMNLTRGVDLKSIADKMEGASGAELKGVCTEAGMFALRERRVHVTQDDFELAVAKILNKGNSSEMSLQKLFK

SEQ ID NO: 5600 - DNA, 1317 bp, Schizosaccharomyces japonicus yFS275
  CDS (1)..(1317)
atgcctcctaaagaagattgggaaaagtacaaacgccctgttgacgaagaggaaaaggatgagaacaatcctcctcctttggacgagaatgacattgcgttgctgaaaacatatggtgccggaccttacggtagcgcgttgaaagagatcgagaaggacacaaaagctgttttgaagcggattaatgacactgttggaattaaagagtcagataccggtctcgcaccacttgcgtactgggatgtcgcagcagatcgtcaaagaatgagcgaagaacagcctctccaagtcgctcgttgcacaaaaattatagaaaacgaacaagaaccagaaaaatccgcatatctgattaatatgaagcaaatagctaagtttgttgtcagtctgggagagcgtgttagtcccaccgacatcgaggaaggaatgcgtgtgggatgtgatcgcacaaagtattctattcagttacctcttcctccaaaaattgatccctctgtgacgatgatgcaagttgaggagaagcccgatgtcacctacggtgatgtcggtggctgtaaagaacaaattgaacgtcttcgtgaagttgttgaacttccgctactttcgcccgagcgcttcgttaaacttggcatcgatccaccaaaaggtattatgttgtacggtcctcccggtacaggaaaaacactctgtgctcgtgccgtcgctaatcggacggatgccacatttattcgtgtcatcggttcggaacttgttcagaagtacgtcggtgaaggcgctcgtatggtgcgtgaactcttcgagatggctcgtaccaaaaaggcttgtattattttctttgatgaagtcgatgcaatcggtggtgcccgtttcgatgacggtgccggaggtgataatgaagtgcaacggacaatgcttgaactaattacccaacttgacggtttcgacccccgtggaaacattaaagttttgttcgcaacaaatagacctaataccctggatgccgcactcttgcgtcctggccgtattgatcgaaaagtcgaattcggcctgcctgatttggaaggcagagcacatatccttaaaattcacgctaaaagtatggctattgataaagatattcgttgggagcttatttctcgtttatgcccctcgcaaactggagccgagcttcgctctgtttgtaccgaagccggtatgtttgccatccgtgcaagaaggagagttgctactgagaaggatttccttgacgccgtgcagaaggtcgttaaaggaaaccaaaaattcagtagtactgctgattacatgaacatgagttcttag

SEQ ID NO: 5601 - protein, 438 aa, Schizosaccharomyces japonicus yFS275
MPPKEDWEKYKRPVDEEEKDENNPPPLDENDIALLKTYGAGPYGSALKEIEKDTKAVLKRINDTVGIKESDTGLAPLAYWDVAADRQRMSEEQPLQVARCTKIIENEQEPEKSAYLINMKQIAKFVVSLGERVSPTDIEEGMRVGCDRTKYSIQLPLPPKIDPSVTMMQVEEKPDVTYGDVGGCKEQIERLREVVELPLLSPERFVKLGIDPPKGIMLYGPPGTGKTLCARAVANRTDATFIRVIGSELVQKYVGEGARMVRELFEMARTKKACIIFFDEVDAIGGARFDDGAGGDNEVQRTMLELITQLDGFDPRGNIKVLFATNRPNTLDAALLRPGRIDRKVEFGLPDLEGRAHILKIHAKSMAIDKDIRWELISRLCPSQTGAELRSVCTEAGMFAIRARRRVATEKDFLDAVQKVVKGNQKFSSTADYMNMSS

SEQ ID NO: 5602 - DNA, 1170 bp, Schizosaccharomyces japonicus yFS275
  CDS (1)..(1170)
atggccagcacagaacaaacagacctgtacaatcgctggaaagcgctccagcatcagctggagatgctggatttgcaagaagaattcattaaagacgactgtaagtcactaaaacgcgaacttcttcgcgcccaagaggaagtgaaaagaatccagtcggtacctttagttatcggtcaatttctggaagccattgaccaaaacacggccattgttggaagcacaacaggatctaattacgttgtccgtattctcagcacactcgatcgtgaactgctgaaaccaagtgccagtgttgccttacaccggcattccaacgcgttggtcgatatcctgccacctgaggccgactcttcgatctctatgctgcgtgccgacgaacgtcctgatgttacgtatgctgatgttggtggtttggacgtgcaaaagcaagaaatccgggaagcagtcgaactgcctctcacacaaggcgatttgtacaagcaaatcggtatcgatcccccccgtggtgtcctgctgtatggacctcctggtacaggaaaaacaatgctcgtcaaagctgtcgccaacagcacgaacgccaactttatccgtgttgtgggttccgaatttgttcaaaagtatctcggtgagggacctcgtatggtccgtgacgtctttcgaatggcacgcgagaacgctccttctattatctttattgacgaaattgatgctattgctacgaaacgttttgatgcccaaactggtgctgaccgagaggtgcagcgtattttaatcgaactcctcacgcagatggacggtttcgaccaagaggccaacgtcaaggtgattatggccacaaaccgtgcagacacactcgatcccgccttattgcgtcccggccgtctcgatcgtaaagtggaattcccttcataccgtgatcgtcgtcaacgccgtcttgtattccaaaccatctgctccaaaatgtcactttcgcctgaggttgaccttgacacattcattatgcggccagatgcttctagtggtgcccaaattgctgctatcatgcaagacgcaggtttgctcgccgtgcgtaagagccgtggtgtcatccttcaaagcgatatcgaggaggcatatgctcgtgccgtcaagcctacagacatggagcaattcgctttctacaagtaa

SEQ ID NO: 5603 - protein, 389 aa, Schizosaccharomyces japonicus yFS275
MASTEQTDLYNRWKALQHQLEMLDLQEEFIKDDCKSLKRELLRAQEEVKRIQSVPLVIGQFLEAIDQNTAIVGSTTGSNYVVRILSTLDRELLKPSASVALHRHSNALVDILPPEADSSISMLRADERPDVTYADVGGLDVQKQEIREAVELPLTQGDLYKQIGIDPPRGVLLYGPPGTGKTMLVKAVANSTNANFIRVVGSEFVQKYLGEGPRMVRDVFRMARENAPSIIFIDEIDAIATKRFDAQTGADREVQRILIELLTQMDGFDQEANVKVIMATNRADTLDPALLRPGRLDRKVEFPSYRDRRQRRLVFQTICSKMSLSPEVDLDTFIMRPDASSGAQIAAIMQDAGLLAVRKSRGVILQSDIEEAYARAVKPTDMEQFAFYK

SEQ ID NO: 5604 - DNA, 1326 bp, Branchiostoma floridae
  CDS (1)..(1326)
atgggtcaaaaccagtccggaggtgccggtgggcaaggaggggaaaagaaagacgacaaggacaagaagaagcgttatgagccgcctgttcccaccagggtggggaagcgcaggaagaaggggaaggggccggactctgctaacaaactccctgcagtgaccccgcacacccgctgcagactgaagctgctgaagctggagaggattaaggactacatgctgatggaggaagagttcatcaggaaccaggagaggctcaagcctcaggatgagagggtggaggaggagcgttctaaggtggatgacctgcgaggcagccccatgtctgtaggttccctggaggagatcatagatgacaaccacgccatcgtgtccacatccgtggggtcggagcactacgtcagcatcctgtcctttgtggataaggaccagctggagccgggctgctctgttctcatgaaccataaggtgcatgctatagtgggcgtgctgggcgatgacacagaccccatggtgacagtcatgaagcttgaaaaagcccccaaggaatcatacgcagacataggaggcttggatcagcagatccaggagatcaaggagtcggtggagctgcccctgactcacccagagtactatgaagagatgggcatcaaacctcccaagggagtcatcctgtatggtgctcctggaacaggtaaaactctcctggccaaggcagtggccaaccagacatcagccaccttcctgagagtcgtcgggtcggagttgatccagaagtacctcggggacggacccaagctggtgcgcgagctgttcagagtggcggaggaacacgccccgtccatcgtcttcatcgacgagatcgacgcggtgggtacgaagcggtacgagtccaactccggcggggaacgtgagatccagcggaccatgctggagctgctgaaccagctggacgggtttgactcacggggggatgtcaaggtaattatggccaccaaccgaatagaaactctggacccagccttgatcagacctggccgcattgaccgtaagatcgagttcccgctgccagacgagaaaacaaagagaagaatcttccagatccacacgagtcgcatgaccctggcggaagacgtaaacctggaggactttatcatggctaaagacgacctttcaggggccgatatcaaggctatctgcactgaagcaggattgatggctctacgagaacgcagaatgaaagtcaccaacgaagacttcaagaaatccaaggagaatgtgctgtataggaagaacgaggggacaccggaggggctgtacttgtag

SEQ ID NO: 5605 - protein, 441 aa, Branchiostoma floridae
MGQNQSGGAGGQGGEKKDDKDKKKRYEPPVPTRVGKRRKKGKGPDSANKLPAVTPHTRCRLKLLKLERIKDYMLMEEEFIRNQERLKPQDERVEEERSKVDDLRGSPMSVGSLEEIIDDNHAIVSTSVGSEHYVSILSFVDKDQLEPGCSVLMNHKVHAIVGVLGDDTDPMVTVMKLEKAPKESYADIGGLDQQIQEIKESVELPLTHPEYYEEMGIKPPKGVILYGAPGTGKTLLAKAVANQTSATFLRVVGSELIQKYLGDGPKLVRELFRVAEEHAPSIVFIDEIDAVGTKRYESNSGGEREIQRTMLELLNQLDGFDSRGDVKVIMATNRIETLDPALIRPGRIDRKIEFPLPDEKTKRRIFQIHTSRMTLAEDVNLEDFIMAKDDLSGADIKAICTEAGLMALRERRMKVTNEDFKKSKENVLYRKNEGTPEGLYL

SEQ ID NO: 5606 - DNA, 1254 bp, Branchiostoma floridae
  CDS (1)..(1254)
atggaggagattggagtagtggtgaacaaagaagaaacccagatccccagccccgagtccaggccggggacgggtctatcctccaccataagtgagaaggacacgtcagaggacctctacacgaggtacaagaagctgcagcgtcagctggagttccttgaagtccaagaggagtacattaaggacgagcagcggaacctgaagaaggagtacctgcatgcccaggaagaggttaaacgtatccagagtgttccacttgtcataggtcagttcctggaggctgttgaccagaacacagggattgtgggatccaccacagggtccaactactatgtgcggatcctgagtacgatagaccgcgagctgctgaagcccagttcgtcagtagcgctccacaagcacagtaatgccctggtggatgtcctgccccctgaggcagactccagtatcaccatgctgtctgctgaggaaaagcctgatgtggcctatgcagatattggtgggatggacatgcagaaacaggagatccgcgaggctgtggaactgccgctcacacacttcgacctgtaccagcagatcggcattgacccaccacggggggtcctaatgtacgggccgcctggctgtgggaaaactatgctggccaaggctgtggctcatcacaccactgcttctttcattagggttgtcggttctgaatttgttcaaaagtacctcggagaaggcccaagaatggtacgagatgtctttcggctagccaaggagaatgcacctgccatcatctttattgatgagatcgatgccatagcaaccaagagatttgatgcacagacaggagctgatcgagaggtccagcgaatcctgcttgagttgctgaaccaaatggacgggtttgaccaaacagtcaatgtcaaagtcatcatggcgaccaaccgagccgacacgctggaccctgctctgctgcggccaggtcgtttggacaggaagattgagtttcccatgccggacaggagacagaaacgactcatcttccagaccatcaccggtaagatgaacatgtctgaggaagtggacctggaggactatgtggccagacctgacaggatcagtggcgctgacattaactccatcgtgcaggaagcagggatgttggcagtgcgagagaaccgctacattgtgctggcaaaggactttgagaaggcatacaagacagcaatcaagaaggacgagacagaacatgagttctacaagtag

SEQ ID NO: 5607 - protein, 417 aa, Branchiostoma floridae
MEEIGVVVNKEETQIPSPESRPGTGLSSTISEKDTSEDLYTRYKKLQRQLEFLEVQEEYIKDEQRNLKKEYLHAQEEVKRIQSVPLVIGQFLEAVDQNTGIVGSTTGSNYYVRILSTIDRELLKPSSSVALHKHSNALVDVLPPEADSSITMLSAEEKPDVAYADIGGMDMQKQEIREAVELPLTHFDLYQQIGIDPPRGVLMYGPPGCGKTMLAKAVAHHTTASFIRVVGSEFVQKYLGEGPRMVRDVFRLAKENAPAIIFIDEIDAIATKRFDAQTGADREVQRILLELLNQMDGFDQTVNVKVIMATNRADTLDPALLRPGRLDRKIEFPMPDRRQKRLIFQTITGKMNMSEEVDLEDYVARPDRISGADINSIVQEAGMLAVRENRYIVLAKDFEKAYKTAIKKDETEHEFYK

SEQ ID NO: 5608 - DNA, 1338 bp, Vitis vinifera
  CDS (1)..(1338)
atgggtcagggagcttccggcggtttgaatcggcaaggtctgccgggcgacagaaagaacgatggcgacaagaaggagaaaaagttcgagccagcggctccgcctgccagagttggccggaagcaacgtaaacaaaaggggccggaggcagcggcgcggctgccgacggtgacgcctctgagcaagtgcaagcttaggctgctgaagctggagcggatcaaggactatcttctaatggaggaggagttcgtcagtaaccaggagaggttgaagccgcaggaggagaagactgaggaggatagatccaaggtcgatgatctgcgtggatctccgatgagtgtagggaatctggaggagctgattgacgagaaccacgccatcgtgtcgtcgtccgtgggtccggagtattatgtggggattttgtcgtttgttgataaggatcagctcgagcctggttgcgccattcttatgcacaataaggttctttctgttgttggtcttctccaagacgaagttgatccaatggtgtccgtaatgaaagttgagaaggctccattggaatcatatgctgacataggaggcttagatgcccagatacaggaaatcaaagaagcagttgaactccctctaacacatcctgaactgtatgaggacattggtatcaagcctcctaagggggtcatactatatggagagcctggaacaggaaagaccttgcttgcaaaggcagttgcaaactctacatcagcaactttcttacgtgttgttggcagtgagttaattcaaaaatatttgggagatgggccaaaattagtgagggagttatttagagttgctgatgatctctcaccttcaattgtcttcattgatgaaattgatgcagttggtacaaagaggtatgatgctcactcaggtggtgaacgtgaaatccagaggaccatgttggaactgctaaaccagttagacggttttgattcaaggggagatgtcaaagtgattcttgcaacaaacagaattgaaagtttggatccagctttgcttcggcctggtcgaatagataggaagattgaattccctcttcctgacattaaaacaagaagacgcattttccagatacatacatcaaggatgacattggctgatgatgttaacttggaagaatttgttatgactaaggatgagttttctggagctgatataaaggcaatatgcactgaagctggtttgcttgctttaagagaacggcgtatgaaggtgactcatgtagacttcaagaaggcaaaggagaaggtgatgttcaagaagaaagaaggggtgccagaaggactttacatgtga

SEQ ID NO: 5609 - protein, 445 aa, Vitis vinifera
MGQGASGGLNRQGLPGDRKNDGDKKEKKFEPAAPPARVGRKQRKQKGPEAAARLPTVTPLSKCKLRLLKLERIKDYLLMEEEFVSNQERLKPQEEKTEEDRSKVDDLRGSPMSVGNLEELIDENHAIVSSSVGPEYYVGILSFVDKDQLEPGCAILMHNKVLSVVGLLQDEVDPMVSVMKVEKAPLESYADIGGLDAQIQEIKEAVELPLTHPELYEDIGIKPPKGVILYGEPGTGKTLLAKAVANSTSATFLRVVGSELIQKYLGDGPKLVRELFRVADDLSPSIVFIDEIDAVGTKRYDAHSGGEREIQRTMLELLNQLDGFDSRGDVKVILATNRIESLDPALLRPGRIDRKIEFPLPDIKTRRRIFQIHTSRMTLADDVNLEEFVMTKDEFSGADIKAICTEAGLLALRERRMKVTHVDFKKAKEKVMFKKKEGVPEGLYM

SEQ ID NO: 5610 - DNA, 1299 bp, Aspergillus flavus NRRL3357
  CDS (1)..(1299)
atgggagacgtcgccgtggagaatccggcgaacaacgtcacgcctcataccaagccggcaccattggataccatccccaacatagactcaatcgaaggcacagggactgatggaggcgacgaatatgctactttgaagaaactccagagacatttagaatacatccagctccaggaggagtacatcaaggatgagcaaaggagcctgaaaagagaacttgttcgtgcacaggaagaaattaagcggatacaaagtgttcccttggttataggccagttcatggaggcgattgaccagaataccggaatcgtgcaatcgtcaaccggctcgaattatgtcgtccggattctatccacgctcgaccgcgagaagctcaaaccatcgtcctcggtcgctctccatcgccactccaacgcccttgtcgatatcctacctccagaggccgactcctccatcgctatgttaggcgaaaatgagaaaccagacgtcacgtatgccgatgttggtggacttgatatgcagaagcaggaaatccgcgaggcagtggaattgccattgacgcacttcgacctgtacaggcaaatcggtatcgatcctcctcgtggtgtcctgctatacggccctcccggaacaggtaagactatgctggtcaaggcggtggcgaatagcacaactgccagcttcatccgagtaaacggctccgagtttgtccagaagtacttgggtgaaggtcctcgcatggtccgtgatgtgttcaggatggcccgggagaatgcccccgctattatcttcatcgacgaaatcgacgccattgccacaaagcgtttcgacgcccaaactggtgccgatcgtgaggttcaacgtattcttctggaactcctcaaccagatggatggttttgagcaatcgagcaatgttaaggtcattatggctactaaccgggccgatactttggatcctgctctgctgcgtccaggtcgtctggaccgaaagatcgagttcccctctcttcgtgatcggcgagagcgtcggttgattttcaccaccatcgcatctaagatgtccttgtcccctgaggtcgaccttgactcgctgattgtgcgtaatgaacccttgtctggtgctgtcattgccgccatcatgcaggaggctggtctacgagccgtgcggaagaaccggtacaacattatccaatctgaccttgaggatgcttacgctgcccaagtgaagactggacaagaagcggacaggtatgttatttcattcagttatgttaccccgtttatgacaccctactaa

SEQ ID NO: 5611 - protein, 432 aa, Aspergillus flavus NRRL3357
MGDVAVENPANNVTPHTKPAPLDTIPNIDSIEGTGTDGGDEYATLKKLQRHLEYIQLQEEYIKDEQRSLKRELVRAQEEIKRIQSVPLVIGQFMEAIDQNTGIVQSSTGSNYVVRILSTLDREKLKPSSSVALHRHSNALVDILPPEADSSIAMLGENEKPDVTYADVGGLDMQKQEIREAVELPLTHFDLYRQIGIDPPRGVLLYGPPGTGKTMLVKAVANSTTASFIRVNGSEFVQKYLGEGPRMVRDVFRMARENAPAIIFIDEIDAIATKRFDAQTGADREVQRILLELLNQMDGFEQSSNVKVIMATNRADTLDPALLRPGRLDRKIEFPSLRDRRERRLIFTTIASKMSLSPEVDLDSLIVRNEPLSGAVIAAIMQEAGLRAVRKNRYNIIQSDLEDAYAAQVKTGQEADRYVISFSYVTPFMTPY

SEQ ID NO: 5612 - DNA, 1242 bp, Aspergillus flavus NRRL3357
  CDS (1)..(1242)
atgaacggcgctgctgacccggagagagagcaggcgctcgaggactacaagaagagcctgctggagctccgagaatgggaggccaagctcaaatcgctccggatgggaatcaaggatttgcaaagagagtttgatatctcagaggaaaacattaaggctctacagagtgtgggccagatcatcggtgaagtgttgaagcagctggatgaggagagattcattgttaaggcatcatccggtccccgttatgtcgtcggttgccgttcgaaggtcgataagtcgaaactgaaacaagggactcgtgtcgctctcgatatgacaaccctgactatcatgaggatgctgccacgggaggttgatccattagtatacaacatgtctttggaggacccgggacaagtcaacttcgctggtattggtggcttgaacgaacaaatccgagagttacgagaagtgatcgagttgccgctcaaaaatcccgagcttttccaccgagttggtattaagccacccaagggtgtcctcctttatggacctcctggtacaggaaagacactgctggcacgagccgtggcaagctctatggagaccaactttttgaaggttgtctcgtctgccatcgtcgacaagtacatcggtgaatctgcacggttaataagagagatgttcgggtacgccaaggagcatgagccttgtattatcttcatggatgaaatcgatgctattggtggtcgacgattctctgagggtacatccgctgaccgtgaaatccaacggacattgatggagcttcttaaccaattggatggcttcgattaccttggaaagacgaagatcatcatggctacgaacagacctgatactcttgatcccgctctgttgcgagcgggtcgtttggaccgcaagattgagattcctctgcccaatgaagttggtcgtttggagatcttgaagatccactctagtactgtccaactcgagggtgatatagactttgagagcgtcgtgaagatgagcgacggtcttaacggagcagatctgcgcaatgttgtcacggaagcgtatgttatttcattccttactcttttgtttgcggttgatgtttctgacaatgagcacagtggtttgtttgccattaaggactaccgagacgctattaaccaagatgacttcaaccgggcggtgcgcaaggtggcggaagctaagaagctggaaggcaagctggagtaccagaagctttag

SEQ ID NO: 5613 - protein, 413 aa, Aspergillus flavus NRRL3357
MNGAADPEREQALEDYKKSLLELREWEAKLKSLRMGIKDLQREFDISEENIKALQSVGQIIGEVLKQLDEERFIVKASSGPRYVVGCRSKVDKSKLKQGTRVALDMTTLTIMRMLPREVDPLVYNMSLEDPGQVNFAGIGGLNEQIRELREVIELPLKNPELFHRVGIKPPKGVLLYGPPGTGKTLLARAVASSMETNFLKVVSSAIVDKYIGESARLIREMFGYAKEHEPCIIFMDEIDAIGGRRFSEGTSADREIQRTLMELLNQLDGFDYLGKTKIIMATNRPDTLDPALLRAGRLDRKIEIPLPNEVGRLEILKIHSSTVQLEGDIDFESVVKMSDGLNGADLRNVVTEAYVISFLTLLFAVDVSDNEHSGLFAIKDYRDAINQDDFNRAVRKVAEAKKLEGKLEYQKL

SEQ ID NO: 5614 - DNA, 1392 bp, Aspergillus flavus NRRL3357
  CDS (1)..(1392)
atgggtaaccagcagtccaacatcggcggaggccccgggggcgatggaagggatgataaggataagaagaaggacaagcccagatacgaaccacctcctcctcccacgactcgtcttggacgtaagaagcgcaaggctgccggcccaagtacagcttccaaactccccgacatcttcccaacgtcacgatgcaaattacgatacttgcgaatgcaacgggtccacgaccacttgctgctagaagaagaatatgtcgagaatatggaacgtctacgcaaaactaaggcacaggcagcacatgattccgtcagcagaagcgagtttgatattatggaccgaaatgcagacgagaggggtcgcgtcgatgacatgagaggtacccccatgggagtcggcaacttggaagagttaatcgacgacgaccatgccattgtttccagtgctaccggaccagagtactacgtttccatcatgtccttcgttgataaggacttgctggagcctggtgccagcattctgttacaccacaagtctgtctccgttgtcggtgtgctcaccgaggagtccgaccccctggtgtccgtgatgaagcttgacaaggcaccgacggagtcttatgcggatatcggtggtcttgagactcagatccaagaggttcgagaatccgtcgagcttccgctgctccaccctgagctgtatgaagagatgggtatcaagccccccaaaggtgtcattctctacggtgccccgggaaccggaaaaacgctgcttgccaaggcagtcgccaatcaaacaagtgccactttcctccggattgtcggcagtgaactgatccagaaatacctcggtgacggacctcgtttggtgcgacagattttccaggttgctgcggaacacgctccttccattgtcttcattgatgaaattgatgccatcggtacgaagcgttacgactctacttcgggtggtgaacgagaaattcagcgtactatgcttgagcttcttaaccagttggacggtttcgatgaccgcggagatgtcaaggttatcatggccactaacaagattgaaacacttgaccctgctttgattcgtcctggtcgtattgatcgaaagattctcttcgaaaacccagaccaaaataccaagaagaagatcttcaccctgcatacatccaagatgtccctcggcgatgatgtcgatctcgacgagtttatcaaccagaaagacgatctttcaggtgcagatatccgagcaatctgtaccgaagccggtttgatggctttgagagaacgccgtatgagagtgcaaatggaggatttccgctccgctagggaacgtattatgaagacgaagcaagatggaggccctgtggaaggcttgtacctgtag

SEQ ID NO: 5615 - protein, 463 aa, Aspergillus flavus NRRL3357
MGNQQSNIGGGPGGDGRDDKDKKKDKPRYEPPPPPTTRLGRKKRKAAGPSTASKLPDIFPTSRCKLRYLRMQRVHDHLLLEEEYVENMERLRKTKAQAAHDSVSRSEFDIMDRNADERGRVDDMRGTPMGVGNLEELIDDDHAIVSSATGPEYYVSIMSFVDKDLLEPGASILLHHKSVSVVGVLTEESDPLVSVMKLDKAPTESYADIGGLETQIQEVRESVELPLLHPELYEEMGIKPPKGVILYGAPGTGKTLLAKAVANQTSATFLRIVGSELIQKYLGDGPRLVRQIFQVAAEHAPSIVFIDEIDAIGTKRYDSTSGGEREIQRTMLELLNQLDGFDDRGDVKVIMATNKIETLDPALIRPGRIDRKILFENPDQNTKKKIFTLHTSKMSLGDDVDLDEFINQKDDLSGADIRAICTEAGLMALRERRMRVQMEDFRSARERIMKTKQDGGPVEGLYL

SEQ ID NO: 5616 - DNA, 1389 bp, Aspergillus flavus NRRL3357
  CDS (1)..(1389)
atgtctaccttagaggatctcgacgaccttgaccgtgaagagagagagaagaagccccaagatggcgacggcaacggcaggaagccctccggagacggagacgctgacatgaaagacgctgataagaaggacgacgaagaggacctcttggacgatgatattctacaatcgagcacagcggacatcgtcaagcgacggcggatgctggagaacgaaatgcgtataatgaagagtgaatatcaacggttgacgcacgaacagagtaccatgagagaaaaggtcaaagataatcaagagaagatcgaaaataacagacaactaccatatcttgtcggaaatgtggttgaattgttggatttggacgtcgaggctgaagccgcggaagagggtgccaacatcgacctcgatgctactcgagtcggcaagtctgctgtcatcaaaacctcgacccgtcaaaccatctatctccccctcattggtctggtagatcatgagaagctcaagcccggtgatctcattggtgtaaataaggattcatatctcgtcctcgatacattacccgccgaatatgataaccgagtgaaggccatggaggtcgacgaaaagccaacggagaagtacacagatattggaggtctggataagcagattgaagaaattgtcgaagctatagtatggccgatgaaggaggccgaacggtttaagaagctcggcatcaaggcaccgaaaggtgctctgatgtacggtccccccggtaccggaaagaccctcctcgcccgagcctgtgccgcagagacaaacgctaccttcctcaaactcgcgggtccccaactggtgcagatgttcattggtgacggagccaaactcgtccgcgactgcttcgccctcgccaaggagaaggcgccctcgatcatcttcatcgacgaactcgacgcagttggcacaaaacgtttcgattctgaaaagtccggtgaccgcgaggtgcaacgaaccatgctggaactcctcaatcagttggacggattcgcctccgacgaccgcattaaggttctggctgccaccaaccgtgtcgacgtcctggaccctgctctcctccgttccggccgtctggaccgcaagatcgagttccccctccctaacgaggaagcccgcgccaacatcctgcagatccactcccgcaagatggctgtagacgacagcgtgaactgggccgaactggcccgcagcacggatgaattcggcggtgcccaactcaaggctgtctgcgtcgaggccggtatgatcgctctccggaagggaatgagcaaggtcggacacgaaaactacgtcgatgctatcgcggaagtacaagctaagaagaaggataccaacatgggcatctacgtctaa

SEQ ID NO: 5617 - protein, 462 aa, Aspergillus flavus NRRL3357
MSTLEDLDDLDREEREKKPQDGDGNGRKPSGDGDADMKDADKKDDEEDLLDDDILQSSTADIVKRRRMLENEMRIMKSEYQRLTHEQSTMREKVKDNQEKIENNRQLPYLVGNVVELLDLDVEAEAAEEGANIDLDATRVGKSAVIKTSTRQTIYLPLIGLVDHEKLKPGDLIGVNKDSYLVLDTLPAEYDNRVKAMEVDEKPTEKYTDIGGLDKQIEEIVEAIVWPMKEAERFKKLGIKAPKGALMYGPPGTGKTLLARACAAETNATFLKLAGPQLVQMFIGDGAKLVRDCFALAKEKAPSIIFIDELDAVGTKRFDSEKSGDREVQRTMLELLNQLDGFASDDRIKVLAATNRVDVLDPALLRSGRLDRKIEFPLPNEEARANILQIHSRKMAVDDSVNWAELARSTDEFGGAQLKAVCVEAGMIALRKGMSKVGHENYVDAIAEVQAKKKDTNMGIYV

SEQ ID NO: 5618 - DNA, 1317 bp, Anopheles gambiae str. PEST
  CDS (1)..(1317)
atgggacaaaaccagtcagcgggcagcggcggggacaaggataaggataaggataagaagaaaaagtacgagccaccgatcccgacgcgggttggcaaaaagaagcgcaaggcaaagggacccgatgcggccctcaagctgccccaggtcaccccacacacgcgctgccggctgaagctgctcaagctggagcgcatcaaggactatctgctgatggaggaggagttcatccgcaaccaggaaagactgaagccgcaggaggaaaagatcgaggaagagcgctccaaggtggacgacctgcgggggtcgcccatgtcggtcggcacgctggaggagatcatcgacgataaccacgcaatcgtgtcgacgtcggtgggcagcgagcactacgtcagcatcctgtcgttcgtcgacaaggaccagctggaaccgggctgctcggtgctgctgaaccacaaggtgcacgcggtggtcggagtgctgggcgacgacaccgacccgatggtgacggtgatgaagctggagaaagcaccgcaggaaacgtacgccgacatcggcgggctggacacgcagatccaggagatcaaggaatcggtcgagctgcccctcacgcaccccgagtactacgaggagatgggcatcaaaccgccgaagggtgtgatcctgtacggaccgccgggcacgggcaaaacgctgctcgcgaaggcggtggcaaaccagacgtccgccaccttcctgcgagtcgttgggtcggagctgattcagaagtatctcggcgacggtcccaagctggtgcgcgagctgttccgtgtggccgaggagcacgccccgtcgatcgtgttcatcgacgaaatcgatgccgtcggaacgaagcggtacgattccaactcgggcggtgagcgcgaaattcagcgcaccatgctggagttgctcaaccagctggacgggtttgactcgcgcggcgatgtgaaagtaatcatggccacgaatcgtattgaaacgctcgacccggcactgatccgtccggggcgtattgatcgaaagattgagttcccgctgccggacgagaagaccaagcgacgtatcttcaacatccacactgcccgtatgacgctggcggaggacgtgaatctgtcggagttgatcatggcgaaggacgatctgtcgggcgcggacatcaaggccatctgcacggaggcgggcttgatggcgctgcgggagcgccgaatgaaggtgaccaacgaggactttaagaagtctaaggagagtgtgctctaccggaaaaaggagggaacgcccgagggtttgtacatgtaa

SEQ ID NO: 5619 - protein, 438 aa, Anopheles gambiae str. PEST
MGQNQSAGSGGDKDKDKDKKKKYEPPIPTRVGKKKRKAKGPDAALKLPQVTPHTRCRLKLLKLERIKDYLLMEEEFIRNQERLKPQEEKIEEERSKVDDLRGSPMSVGTLEEIIDDNHAIVSTSVGSEHYVSILSFVDKDQLEPGCSVLLNHKVHAVVGVLGDDTDPMVTVMKLEKAPQETYADIGGLDTQIQEIKESVELPLTHPEYYEEMGIKPPKGVILYGPPGTGKTLLAKAVANQTSATFLRVVGSELIQKYLGDGPKLVRELFRVAEEHAPSIVFIDEIDAVGTKRYDSNSGGEREIQRTMLELLNQLDGFDSRGDVKVIMATNRIETLDPALIRPGRIDRKIEFPLPDEKTKRRIFNIHTARMTLAEDVNLSELIMAKDDLSGADIKAICTEAGLMALRERRMKVTNEDFKKSKESVLYRKKEGTPEGLYM

SEQ ID NO: 5620 - DNA, 1380 bp, Magnaporthe grisea 70-15
  CDS (1)..(1380)
atgggtcaaaaccagtccggcatgggcggtggccaagatggcaaagacgacaaggacaagaagaaggataagcccaagtacgaaccccctccacgaccgacgacccgagtcggccgcaagaagagaagaggaggcggcaccagcgccgctgccaagctccccgccatttacccaacgagtcgatgcaagttgagattgctacgaatgcagcgcacacacgatcacttgttgttagaagaggagtttgtcgaaaaccaagaacgcctacgccgggtcaaggccgccaaggacagcaatgctcctgcatctgaccttgacgctggtgatcgcatggccgacgagcgtggccgtgtcgacgacatgcggggcagcccaatgggagttggtaccctcgaggagatgatcgacgacgaccatgccatcgtttcaagcactacgggcccagagtactatgtcagcatcatgagctttgtcgacaaggaccttctggagcccggcgccagcgtactcttgcaccacaagagcgtcagcattgttggtgtcttgaccgatgatgctgaccccttggtcagtgtgatgaagttggacaaggcgcctaccgagtcttatgccgacattggtggtttggagcaacagatccaggaagtccgggagtcagtcgagctgcctctgctacatccggagctctacgaggagatgggtatcaagccacccaagggtgtcattctttacggagctcctggtacaggcaaaacacttttggcaaaggcggtggcgaaccagacttcagctacgttcttgcgcattgttggtagtgagctgatccagaaatatcttggtgatggacctcgattggtgcggcaattgttccaggttgctgctgaaaacgccccctccattgtgttcatcgacgaaattgatgctattggcaccaagagatacgactcgacatctggaggcgagcgtgaggtccaacgtactatgttggagctgctcaaccagcttgatggtttcgacgaccgtggtgacgtaaaggtcatcatggccaccaacaagattgagacgctcgatccggccttgatcaggcccggtcgtatcgacagaaagatcttgttcgagaatcctgaccagaacaccaagcgcaagatcttcacccttcacacctccaagatgtcgctgaacgaggatgtcgatcttgaggagttcattgcgcagaaggatgacctgtctggtgccgacatcaaggccatttgctctgaggctggtttgatggcgctgcgggagaggagaatgcgcgtccagatggccgacttccgcgccgccagggagagggttctgcgcaccaagcaagagggtgagcccgagggactttacctgtaa

SEQ ID NO: 5621 - protein, 459 aa, Magnaporthe grisea 70-15
MGQNQSGMGGGQDGKDDKDKKKDKPKYEPPPRPTTRVGRKKRRGGGTSAAAKLPAIYPTSRCKLRLLRMQRTHDHLLLEEEFVENQERLRRVKAAKDSNAPASDLDAGDRMADERGRVDDMRGSPMGVGTLEEMIDDDHAIVSSTTGPEYYVSIMSFVDKDLLEPGASVLLHHKSVSIVGVLTDDADPLVSVMKLDKAPTESYADIGGLEQQIQEVRESVELPLLHPELYEEMGIKPPKGVILYGAPGTGKTLLAKAVANQTSATFLRIVGSELIQKYLGDGPRLVRQLFQVAAENAPSIVFIDEIDAIGTKRYDSTSGGEREVQRTMLELLNQLDGFDDRGDVKVIMATNKIETLDPALIRPGRIDRKILFENPDQNTKRKIFTLHTSKMSLNEDVDLEEFIAQKDDLSGADIKAICSEAGLMALRERRMRVQMADFRAARERVLRTKQEGEPEGLYL

SEQ ID NO: 5622 - DNA, 1266 bp, Magnaporthe grisea 70-15
  CDS (1)..(1266)
atgggcgacgttctcgtggaaaactcttccaactacactcccccacacaaaaaagcggccccgtccacgattcctagtatcgagaactttgaagggttgccgactgaaggcggcgatgattacgctactctgaagaagctccagaggcagcttgaatacatccagcttcaggaggaatacatcaaggatgagcagaggagtttaaagcgagagcttgtgcgtgcgcaagaggagatcaagaggattcagagcgttccactggtcatcggccagtttatggaggcgattgatcaaaacaccggcattgtgcagtcaagcacaggctccaactatgtcgtccggattctctccaccctcgaccgtgagctgctcaagccatcgtcatcagtagcactccaccgccactcgaatgccctcgtcgacatcttgcctccagaggccgactcttcgattgccatgcttggcgccgacgaaaagcccgatgtgacgtatgccgacgtgggaggcctcgacatgcagaagcaggagattcgcgaggctgtcgagctccccctcacacactttgatctgtacaagcagatcggtatcgacccgccgcgcggtgtgctgctgtacggaccccccggtaccggaaagacgatgctggtcaaggcggttgccaatagcaccacggccaacttcatccgcgtcgtcggttctgagtttgtccaaaagtacttgggagagggtccccgcatggttcgtgacgttttccgtatggctcgtgaaaacgcccccgccattatcttcatcgacgaaatcgacgccatcgcaaccaagcgtttcgacgcccaaacaggtgccgatcgtgaggttcagcgtattctgctcgagcttctgaaccagatggacggtttcgaccagactgccaacgtcaaggtcattatggcaaccaacagggccgacactctcgatcctgcccttctccgtcccggtcgattggaccgtaagattgagttcccctctctccgcgaccgccgtgagagacgtctcatcttcggcactatcgccagcaagatgagcctcgcgcccgaggttgaccttgacagtctcattgttcgcaacgacccgctgtccggtgccgtcatcgccgccatcatgcaagaagctggtctgcgcgccgtgcggaagaaccgctacaacatcattcagagtgatcttgaggatgcctattccagccaggtcaagggtaccagtgaggacaacaagtttgatttctacaaataa

SEQ ID NO: 5623 - protein, 421 aa, Magnaporthe grisea 70-15
MGDVLVENSSNYTPPHKKAAPSTIPSIENFEGLPTEGGDDYATLKKLQRQLEYIQLQEEYIKDEQRSLKRELVRAQEEIKRIQSVPLVIGQFMEAIDQNTGIVQSSTGSNYVVRILSTLDRELLKPSSSVALHRHSNALVDILPPEADSSIAMLGADEKPDVTYADVGGLDMQKQEIREAVELPLTHFDLYKQIGIDPPRGVLLYGPPGTGKTMLVKAVANSTTANFIRVVGSEFVQKYLGEGPRMVRDVFRMARENAPAIIFIDEIDAIATKRFDAQTGADREVQRILLELLNQMDGFDQTANVKVIMATNRADTLDPALLRPGRLDRKIEFPSLRDRRERRLIFGTIASKMSLAPEVDLDSLIVRNDPLSGAVIAAIMQEAGLRAVRKNRYNIIQSDLEDAYSSQVKGTSEDNKFDFYK

SEQ ID NO: 5624 - DNA, 1203 bp, Gibberella zeae PH-1
  CDS (1)..(1203)
atgtcagccgaagaagagcgccaggccgcccttaactcgtaccgtgccaagctcatcgagtcgcgagaatgggaggcaaagctaaagaatttgcgtcttgaaatcaaggacatgcaaaaggagttcgacaagacagaggacaacatcaaggcgctacaaagtgtgggacaaattatcggcgaggtgctgaaacagctcgatgatgaacgatttattgtcaaggcctcctccggacctcgatacgtcgtcggatgcagatcaaaggtggacaaggtcaagctgaagcaaggcacccgtgtggcactcgatatgacaacacttaccattatgcgaatgctgcctcgcgaagttgatcctttggtgtacaacatgtccctggaagacccgggccaagtgagctttgctggcattggtggattgaacgatcaaattcgagagttgcgggaggtcatcgagcttccccttaagaaccccgagctcttcctacgagttggaatcaagccaccaaagggtgttttgttgtatggtcctcccggaaccggcaaaaccctgctggcacgagctgtcgccagtagtctggagaccaactttttgaaggtggtatcgtccgctattgtcgacaagtacatcggtgaatcggcgcgactcattcgcgaaatgtttggatatgccaaggagcacgagccctgcatcatcttcatggatgaaatcgatgccatcggtggacgacgtttctcagagggtaccagtgcggatcgagaaattcagagaacacttatggaattgctaaaccagctggacggtttcgactacttgggcaagaccaagatcatcatggccaccaaccgacctgatacgttggaccctgcgctgcttcgagccggccgactcgaccgaaagattgagatcccccttcccaatgaggttggacgtcttgagattctgaagattcactcacaaagcgttgtgatcgatggtgatctggactttgagagcgtggtgaagatgagcgatggactcaacggtgctgatttgcgaaatgttgttactgaagccggtctatttgccattaaggactacagagagtcaatcaaccaggatgatttcaacaaggctgttcgcaaggtagccgaatccaagaagctggaaggcaagcttgagtaccagaagctaatcgacgagcgggccacgattggacaataa

SEQ ID NO: 5625 - protein, 400 aa, Gibberella zeae PH-1
MSAEEERQAALNSYRAKLIESREWEAKLKNLRLEIKDMQKEFDKTEDNIKALQSVGQIIGEVLKQLDDERFIVKASSGPRYVVGCRSKVDKVKLKQGTRVALDMTTLTIMRMLPREVDPLVYNMSLEDPGQVSFAGIGGLNDQIRELREVIELPLKNPELFLRVGIKPPKGVLLYGPPGTGKTLLARAVASSLETNFLKVVSSAIVDKYIGESARLIREMFGYAKEHEPCIIFMDEIDAIGGRRFSEGTSADREIQRTLMELLNQLDGFDYLGKTKIIMATNRPDTLDPALLRAGRLDRKIEIPLPNEVGRLEILKIHSQSVVIDGDLDFESVVKMSDGLNGADLRNVVTEAGLFAIKDYRESINQDDFNKAVRKVAESKKLEGKLEYQKLIDERATIGQ

SEQ ID NO: 5626 - DNA, 1266 bp, Gibberella zeae PH-1
  CDS (1)..(1266)
atgggtgacgtcgctgtcgaaaacccagcaaaccaagtggcgcctcacaagagggccgcgcactcagccattcccaccattgacaacttcgagggtgtgtctaccgatgggggagacgattacgcgaacctgaagaagcttcagaggcaactcgagtacattcagttgcaagaagagtacatcaaagatgagcaaaggagtctcaagcgtgagctggtgcgagctcaagaagagatcaagcgaatccaaagtgtcccactagtgatcgggcagtttatggaggccattgatcaaaataccggtatagttcagtccagcactggcagtaactatgtagtccgaatcctttccaccctagaccgtgagaagctcaaggcttcatcctcggtcgccctccaccgacattccaacgccctcgtcgacatcctccctcccgaggccgattcctccattgccatgcttggcacagacgagaagcccgatgtgacatacgccgatgtcggtggtctggacatgcagaaacaggagatccgtgaagctgttgaattgcccttgacacacttcgacctttacaagcagatcggtatcgaccctcctcgtggtgttcttctgtacggtcctcccggtaccggcaagactatgctagtcaaggctgtcgccaactcgaccactgccaacttcatccgagttgttggttctgagttcgtccagaaatacctgggtgagggcccccgaatggtccgagatgttttccgtatggctcgcgaaaactcccccgccatcatcttcatcgacgagatcgacgccatcgccaccaaacgattcgatgctcaaactggtgccgacagagaagtccagcgtattctgcttgagctactcaaccagatggatggtttcgaccagactgctaacgtcaaggtcatcatggccaccaaccgagctgatactctggaccctgccctcctccgacccggacgtctcgatcgaaagatcgaattcccttcgctacgagaccgacgtgagcgccgtctcatcttctccaccattgccagcaagatgagtctggctcccgaggttgacctcgactctttgatcgtccgaaacgatcctctgtccggtgcggttatcgctgctattatgcaggaggcaggtctacgtgccgtccgtaaaaaccgatacaacatcattcagaccgatctcgaggacgcctactcaagccaggtcaagggaacgggcgaagagaacaagttcgacttctacaaataa

SEQ ID NO: 5627 - protein, 421 aa, Gibberella zeae PH-1
MGDVAVENPANQVAPHKRAAHSAIPTIDNFEGVSTDGGDDYANLKKLQRQLEYIQLQEEYIKDEQRSLKRELVRAQEEIKRIQSVPLVIGQFMEAIDQNTGIVQSSTGSNYVVRILSTLDREKLKASSSVALHRHSNALVDILPPEADSSIAMLGTDEKPDVTYADVGGLDMQKQEIREAVELPLTHFDLYKQIGIDPPRGVLLYGPPGTGKTMLVKAVANSTTANFIRVVGSEFVQKYLGEGPRMVRDVFRMARENSPAIIFIDEIDAIATKRFDAQTGADREVQRILLELLNQMDGFDQTANVKVIMATNRADTLDPALLRPGRLDRKIEFPSLRDRRERRLIFSTIASKMSLAPEVDLDSLIVRNDPLSGAVIAAIMQEAGLRAVRKNRYNIIQTDLEDAYSSQVKGTGEENKFDFYK

SEQ ID NO: 5628 - DNA, 1248 bp, Apis mellifera
  CDS (1)..(1248)
atggatgatatgggtattattctacccgataaggatgttggagaaatggaatgcaaacctgtaattggacactatacaggtgctggtgatgaattggatgttgaagatctttataccaagtataaaaaattacaaagaatgttagaatttcttgaagttcaagaagaatatatcaaagatgaacaacgtaatctgaaaaaagaatatttacatgctcaagaagaagtaaaacgcatacaaagtgtacctttagttattggacaattcttagaagctgtagaccaaaatactggtattgtaggttctactacaggttcaaattattatgtacggattttatctacaattgacagagaattattaaaaccatctgctagtgtagctctacataaacatagtaatgctttagtagatgttttaccaccagaagctgattcaagtatttcaatgttacaagcagatgaaaaaccagatattcaatatagcgatattggtggtatggatatgcaaaaacaagagattagagaagcagtagaactacctttaactcattttgagttgtataagcaaattggaattgatccaccaaggggtgtgttaatgtatggtccccctggatgtggtaaaaccatgcttgcaaaagctgtagctagacatactactgctgcatttattcgtgtagtaggatcagaatttgtacagaaatatttaggtgaagggccaagaatggtgagagatgtcttccgtttagctaaagaaaattcaccagctataatttttgttgatgaaatcgatgctatagctacaaaaagatttgacgctcagactggtgctgatcgtgaagtgcaacgtattcttttggaattgcttaatcaaatggatggttttgatcaaactactaatgttaaagttataatggcaacgaatagagctgatacattagatcctgcattattacgtcctggcagattagatagaaaaattgaatttcctttgcctgatcgccgtcaaaaacgtctaattttttcaacaattactgcaaaaatgaatttaagtgaagaggtagatcttgaagattatgttgcgcgaccagatagaatttctggcgctgatattaatgcaatttgccaagaagcaggaatgcatgcggttcgtgagaatcgatacatagtcttagcaaaagattttgaaaagggttataagaataatattaaaaaggatgaatctgaacatgaattctacaagtaa

SEQ ID NO: 5629 - protein, 415 aa, Apis mellifera
MDDMGIILPDKDVGEMECKPVIGHYTGAGDELDVEDLYTKYKKLQRMLEFLEVQEEYIKDEQRNLKKEYLHAQEEVKRIQSVPLVIGQFLEAVDQNTGIVGSTTGSNYYVRILSTIDRELLKPSASVALHKHSNALVDVLPPEADSSISMLQADEKPDIQYSDIGGMDMQKQEIREAVELPLTHFELYKQIGIDPPRGVLMYGPPGCGKTMLAKAVARHTTAAFIRVVGSEFVQKYLGEGPRMVRDVFRLAKENSPAIIFVDEIDAIATKRFDAQTGADREVQRILLELLNQMDGFDQTTNVKVIMATNRADTLDPALLRPGRLDRKIEFPLPDRRQKRLIFSTITAKMNLSEEVDLEDYVARPDRISGADINAICQEAGMHAVRENRYIVLAKDFEKGYKNNIKKDESEHEFYK

SEQ ID NO: 5630 - DNA, 1302 bp, Candida glabrata CBS 138
  CDS (1)..(1302)
atgggtcaaggagtttcacaagataagaagaagaagaaaggtggcaagccaaagtatgaaccaccggtacaaagcaagtttggcagaaagaaaaggaaaggtgggccagctaccgctgagaaattgcctaatgtagttccttcaacgcgatgcaagttgaagctattgcgtatggaacgtatcaaggaccaccttttgctagaggaagagtttgtaactaattcagagatattgaaaccattcgaaaagaagcaagaagaggagaagaagcaattggaggagattagaggtaatccattgagtataggtactttggaagaaatcattgacgatgatcatgcaattgtgacgtctccaacaatgccagactactatgtgtcaatcttatcgtttgtggataaggagttactagagccaggctgttctgtcttattgcatcacaagaccatgtccatcgtgggtgttctacaagatgacgccgatccaatggtgtcagtgatgaaaatcgataaatcaccaacagaatcatacagcgacattggtggtttagaatcgcaaatccaggagattaaagaatctgtggaactacctctaacacacccggagttatacgaagagatgggtatcaagcctccaaagggtgtaattctttatggtgctccaggtaccggtaaaacattactggcgaaagcggttgcaaatcaaacgtcagccacatttttaaggatagttggttccgaactgattcagaaatatttgggtgatggtccaaggttgtgtagacaaattttcaaagtagctgctgagaatgctccaagtattgttttcatcgatgaaatcgatgctattggtacaaagagatacgactcgaatagtggtggtgaaagagaaattcagagaacaatgttggaactactaaatcaacttgacggtttcgacgatagaggtgacgttaaagttattatggcaacaaataagattgaatccttagaccctgcattgattagacctggtagaatcgaccgtaaaattcttttcgaaaatccggatttatctactaagagaaagattttgggtattcacacatcgaaaatgaacttgagctcagatgtcgatcttgagaacctagtgacgagtaaagatgacttatctggtgcagatatacaagcaatgtgtacagaggccggtctattggccttgagagaaagaagaatgcaagtcactgctgaagatttcaaacaagcgaaggaacgtgttatgaagaataagatagaagaaaacctagaaggtttgtatctataa

SEQ ID NO: 5631 - protein, 433 aa, Candida glabrata CBS 138
MGQGVSQDKKKKKGGKPKYEPPVQSKFGRKKRKGGPATAEKLPNVVPSTRCKLKLLRMERIKDHLLLEEEFVTNSEILKPFEKKQEEEKKQLEEIRGNPLSIGTLEEIIDDDHAIVTSPTMPDYYVSILSFVDKELLEPGCSVLLHHKTMSIVGVLQDDADPMVSVMKIDKSPTESYSDIGGLESQIQEIKESVELPLTHPELYEEMGIKPPKGVILYGAPGTGKTLLAKAVANQTSATFLRIVGSELIQKYLGDGPRLCRQIFKVAAENAPSIVFIDEIDAIGTKRYDSNSGGEREIQRTMLELLNQLDGFDDRGDVKVIMATNKIESLDPALIRPGRIDRKILFENPDLSTKRKILGIHTSKMNLSSDVDLENLVTSKDDLSGADIQAMCTEAGLLALRERRMQVTAEDFKQAKERVMKNKIEENLEGLYL

SEQ ID NO: 5632 - DNA, 1296 bp, Candida glabrata CBS 138
  CDS (1)..(1296)
atggaggaactagggatctcgggtccattggagagcaatggacatgctaatggtaatggtgctggcaatggaaatgtgaaatcatatgcaaatttgctcgagcagctcgggaatagtaaagtatttagcatgcaaggcaataacgatgtttacctgcgtttgaaaaagcttgaaaaagaattagagctgctgagcttgcaggaagaatatatcaaggatgagcagcgacatttgagactcgagctaagtagggctcaggaggaagtgaaaagaattcaatctgtccccttggtgataggtcaattcttggaagcaattgaccaggatacaggtattgtatcgagcacaacaggtatgaactatgtggtaagaatattatctacattagaccgtgagcaattgaagccttctacttctgtggctttgcaccgtcactcaaatgccttggtcgatatattgccacctgactccgattcgagtatatcggttatgggagagaatgaaaaaccagatgttacatacgctgatgtcggtggtctagacatgcaaaaacaagaaataagagaagctgtggaattaccattggtacaagcagacttatacgaacaaataggtattgatcctccaagaggtgtgctattgtatggtcctccaggtacaggtaagacaatgttagttaaagctgtggcaaatagtacaaaggctgcatttattagagtaaatggttctgaatttgttcagaaatacctgggtgaaggtcctagaatggttcgtgatgttttcaggttggcaagagaaaattctccttcgattgttttcatagatgaagtggattccattgctacgaaacgtttcgatgctcaaactggttctgatcgtgaagttcaacgtattttgattgaattattaacccagatggatggttttgatcaatccactaacgttaaagttattatggctaccaacagagcagacacattagacccagctcttttgagacctggtagacttgatagaaaaatcgaattcccatctttgcgtgacagaagagagcgtcgtttaattttcggtacaattgcaagtaaaatgtctttggcacctgaggcagatcttgattctttgatcatccgtaatgatgccatatctggtgcagtaattgccgcaattatgcaagaagctggtctacgtgcagtcagaaagaacagatatgtgattttacaaagcgatcttgaggaggcttatgctgcacaagttaaaaccgacagcgatgttgataaatttgacttctataaatag

SEQ ID NO: 5633 - protein, 431 aa, Candida glabrata CBS 138
MEELGISGPLESNGHANGNGAGNGNVKSYANLLEQLGNSKVFSMQGNNDVYLRLKKLEKELELLSLQEEYIKDEQRHLRLELSRAQEEVKRIQSVPLVIGQFLEAIDQDTGIVSSTTGMNYVVRILSTLDREQLKPSTSVALHRHSNALVDILPPDSDSSISVMGENEKPDVTYADVGGLDMQKQEIREAVELPLVQADLYEQIGIDPPRGVLLYGPPGTGKTMLVKAVANSTKAAFIRVNGSEFVQKYLGEGPRMVRDVFRLARENSPSIVFIDEVDSIATKRFDAQTGSDREVQRILIELLTQMDGFDQSTNVKVIMATNRADTLDPALLRPGRLDRKIEFPSLRDRRERRLIFGTIASKMSLAPEADLDSLIIRNDAISGAVIAAIMQEAGLRAVRKNRYVILQSDLEEAYAAQVKTDSDVDKFDFYK

SEQ ID NO: 5634 - DNA, 1287 bp, Kluyveromyces lactis NRRL Y-1140
  CDS (1)..(1287)
atggaagaactaggtattagtactcctcaacctgttcttagtgtagaatttggtgcaaagaataatggtctatcatatggttccctacttgctcagctaaataatgattcatttgccgtggcgaatggtaattcagatgtctacttgaaactaaagaagctggagaaagaatatgaattattgacattacaagaagattatatcaaagatgaacagcgccatttgaagagggaattactcagagcccaagaggaagtgaaaagaatccaatctgtgccacttgtcattggtcaatttttggaaccgattgacgaaaacaccggtatcgtctcctcgaccacaggtatgagttatgtcgtaaggattctatcgactctagatagggaactgttaaaaccatcaacttcagttgcattacatcgtcactctaatgcccttgtggatattttaccacctgattcagattctagcatatcaatcatggccgcaaatgaaaagccagatgtcacctatgccgatgttggtgggttagacatgcagaagcaagaaataagagaagctgttgaactacccttggtacaggcggatttgtatcaacagattggtattgacccaccaagaggggttttactttatggtcctcctggtactggcaaaactatgttagttaaggccgtggcaaacgcgacagaagccgcattcatcagagtgaacgggtcagagtttgtgcataaatacttaggtgaagggccaagaatggttagagatgttttcagattggcaagagaaaactcaccatcaattattttcatcgatgaagtggattccatcgctacaaaacgtttcgatgctcagacagggtctgatcgtgaagtccaacgtatattgattgagttacttactcaaatggatggttttgatcagtcaacaaatgttaaagttataatggcaaccaatcgtgctgatactctagatccagctttgttaagacctggtagattagacagaaagatcgaattcccttcattaagggacaggcgtgaacgtcgtttaatttttggtactatagctgcaaagatgtctttagctcctgaagcagatttagattctttgatcatcagaaatgatcctttatctggtgctttgattgccgccattatgcaagaagctggtctaagagctgtcagaaagaacagatacgtcatcctacaaagcgatttggaggaagcgtatgcttcacaagtcaagtcaggtagcgatgttgataaattcgacttctataaataa

SEQ ID NO: 5635 - protein, 428 aa, Kluyveromyces lactis NRRL Y-1140
MEELGISTPQPVLSVEFGAKNNGLSYGSLLAQLNNDSFAVANGNSDVYLKLKKLEKEYELLTLQEDYIKDEQRHLKRELLRAQEEVKRIQSVPLVIGQFLEPIDENTGIVSSTTGMSYVVRILSTLDRELLKPSTSVALHRHSNALVDILPPDSDSSISIMAANEKPDVTYADVGGLDMQKQEIREAVELPLVQADLYQQIGIDPPRGVLLYGPPGTGKTMLVKAVANATEAAFIRVNGSEFVHKYLGEGPRMVRDVFRLARENSPSIIFIDEVDSIATKRFDAQTGSDREVQRILIELLTQMDGFDQSTNVKVIMATNRADTLDPALLRPGRLDRKIEFPSLRDRRERRLIFGTIAAKMSLAPEADLDSLIIRNDPLSGALIAAIMQEAGLRAVRKNRYVILQSDLEEAYASQVKSGSDVDKFDFYK

SEQ ID NO: 5636 - DNA, 1305 bp, Kluyveromyces lactis NRRL Y-1140
  CDS (1)..(1305)
atgggtcaaggagcttcttctcatgggcagaagaaaaaggataagaaacaaaagccaaaatatgagccaccagtagaatcaaaattcggtagaaagaagagaaaggggccctctacggtggagaaacttcctagcgtttatccaagcacaagatgtaagttaaaacttttgagaatggaacgtataaaagatcatttgctattggaagaagagtatgtgacaaactctgagatcttgaaaccatttgagaagaaacaagaggaagaaaagaagcagctagacgatatcagaggtactccgttatctattggtactttagaagaaattgtggacgatgaccatgctatagtgacaagccctacgacaccagactactacgtttccattttgtcctttgttgacaaagagctattagaacccggctgttctgtgttattacaccataagaccatgtcagttgttggtgtcttgcaagacgatgccgatccaatggtttctgtgatgaagatggataaatcaccaacagaaaactacagtgatatcggtggattagaggcacaaattcaagagattaaagaagcagtcgagttgccactaacgcatcctgaactatacgaagaaatgggtatcaaaccaccaaagggtgtcatattgtatggtgctccaggtacaggtaagacgttattggcaaaggctgtggcgaaccagacttctgctacatttttaagaattgtgggatccgaattgattcagaaatatctaggtgacggtccaagactctgtagacaaattttcaaagtcgctgcagagaatgcgccaagtatagtctttatcgatgaaatcgatgctattggtaccaagagatatgaatcaaacagtggcggtgagaaagagattcaaagaactatgttggaacttttaaaccaattggacgggtttgatgatagaggtgatgtgaaagtcatcatggctacaaacaaaatcgaaagtttagatccagctttgatcagacccggaagaatcgaccgtaagattttgttcgaaaaccccgatataacaacaaagagaaaaatcgtcggtattcatacatctaagatgaacttagcagaggacgtagacctagataatttggtcacttcaaaagatgacctatcaggtgcagacatcaaagcaatgtgtacagaagcggggcttttggctctaagagaaagaagaatgcaagtcacagcacaagatttcaaggaagcaaaagaacgtgtactcaaaaataaggttgaagaaaacttggaaggtttgtacttataa

SEQ ID NO: 5637 - protein, 434 aa, Kluyveromyces lactis NRRL Y-1140
MGQGASSHGQKKKDKKQKPKYEPPVESKFGRKKRKGPSTVEKLPSVYPSTRCKLKLLRMERIKDHLLLEEEYVTNSEILKPFEKKQEEEKKQLDDIRGTPLSIGTLEEIVDDDHAIVTSPTTPDYYVSILSFVDKELLEPGCSVLLHHKTMSVVGVLQDDADPMVSVMKMDKSPTENYSDIGGLEAQIQEIKEAVELPLTHPELYEEMGIKPPKGVILYGAPGTGKTLLAKAVANQTSATFLRIVGSELIQKYLGDGPRLCRQIFKVAAENAPSIVFIDEIDAIGTKRYESNSGGEKEIQRTMLELLNQLDGFDDRGDVKVIMATNKIESLDPALIRPGRIDRKILFENPDITTKRKIVGIHTSKMNLAEDVDLDNLVTSKDDLSGADIKAMCTEAGLLALRERRMQVTAQDFKEAKERVLKNKVEENLEGLYL

SEQ ID NO: 5638 - DNA, 1302 bp, Debaryomyces hansenii CBS767
  CDS (1)..(1302): transl_table=12
atgccaggaggcgatttcaataagaagaaagatgataagaagaaggaaaagcccaagtatgagcctccagtggagtctaagtttggaaaaaagagaagaaaggggccagatactgcagtgaaattgccaagtgtttatcctagtactagatgtaaattgaaattattgaaattggaaagaatcaaggatcacttattattggaagaggaattcgtgactaaccaagaagctttccaaccaacagaagcaaaacaggctgaagaaagagaaaaagtcgatgaattaagaggatacccaatgtcgattggtacgttggaagaaattatcgatgatgatcatgcaattgtttcgagtactgcgggttctgaatactacgtgtctataatgtcttttgttgacaaaggtttattggaaccaagttgctctgtgttattgcatcataaaaccgtgtcgattgtaggtgtattgcaggacgatgctgacccaatggtgtcagtgatgaaattagataaatctccaaccgaatcatacgccgatattggtggattagagtcacaaattcaagaaattaaagaagcggttgagttaccattaactcatccagaattatacgaagaaatgggtatcaagccaccaaaaggtgtgatattgtatggtgcaccaggtacaggtaagacattattagctaaagcggtagcaaaccaaacaagtgccacattcttaagaatagttgggtccgagttgattcaaaagtacttaggtgatggtccaagattgtgtagacaaattttccagatagccggagagcttgctccttcgattgtctttattgatgaaatagatgctattggtagtaaaagatatgaatcttcatcgggtggtgaaagagaagtccaaagaactatgttggaattgttaaatcaattggatggtttcgatgatagaggtgatattaaggttatcatggcaacgaataaaattgaatcattagatcctgcattaattagacctggtagaatcgatcgtaagattttgtttgaaaaccctgattcaaatactaaaaagagaattcttcatattcatacatccaaaatgagtttagcagatgacgtaaaacttgatgaattagtaacatctaaagatgaattatctggagctgatatcaaagctatgtgtacagaggctggtttattagcgttaagagaaagaagaatgcaagttaaagccgaggatttcaaggctgctaaagaaagagttcttaaaaacaaggtagaagaaaatcttgaaggtttatacttgtaa

SEQ ID NO: 5639 - protein, 433 aa, Debaryomyces hansenii CBS767
MPGGDFNKKKDDKKKEKPKYEPPVESKFGKKRRKGPDTAVKLPSVYPSTRCKLKLLKLERIKDHLLLEEEFVTNQEAFQPTEAKQAEEREKVDELRGYPMSIGTLEEIIDDDHAIVSSTAGSEYYVSIMSFVDKGLLEPSCSVLLHHKTVSIVGVLQDDADPMVSVMKLDKSPTESYADIGGLESQIQEIKEAVELPLTHPELYEEMGIKPPKGVILYGAPGTGKTLLAKAVANQTSATFLRIVGSELIQKYLGDGPRLCRQIFQIAGELAPSIVFIDEIDAIGSKRYESSSGGEREVQRTMLELLNQLDGFDDRGDIKVIMATNKIESLDPALIRPGRIDRKILFENPDSNTKKRILHIHTSKMSLADDVKLDELVTSKDELSGADIKAMCTEAGLLALRERRMQVKAEDFKAAKERVLKNKVEENLEGLYL

SEQ ID NO: 5640 - DNA, 1251 bp, Debaryomyces hansenii CBS767
  CDS (1)..(1251): transl_table=12
atggaagaacttggtatctatgaatctaacggtaaacaagtacacattccaataaacaataagggtaatatcaagcctaaccataatgaggagaattccgatgtatatttgaagttgaagaaattagagaaggaattggacttgttgatgttacaggaagattatatcaaagatgaacagcgtcacttaaaaagggagttagtgagggcacaagaagaggttaagagaatcaagtcggttccattggtgattggacagtttctcgagccaattgacgagaatacgggtattgtttcgtcgactactggatccaactatgtagtaaggatattgtcaacattggatcgagaattgttgaaaccatcgtcatcagtagcattacatcgtcattccaatgcgttagtcgacactttaccacctgaagcagattcgtcgatctctattgttggagacgagcaaaaaccggatgtcacgtatgctgacgttggggggttggatatgcagaaacaagaaatcagggaagcggttgaattgccgttaactcagggtgatttgtattcgcagatcggtattgatcctccaagaggggttttgttgtacgggccaccaggtaccggtaagaccatgttggtgaaggcggtagctaattcatccactgcgtctttcatcagaattaatggttccgagttcgtccagaagtatttgggtgaaggtccaagaatggtgagagatgttttcagattggctagagaaaactctcctgctatcatttttatagatgaaattgatgcaattgcaactaagagattcgacgctcagacgggtgctgatagggaagtgcaaagaatattgttggaattattaaatcaaatggatggtttcgatcaaaattctactgttaaagttataatggcaacaaatagacatgatactttagatccagcgttattaagacctggtagattagatagaaagattgaattcccatcattaaaagatagaagagaaagaagattgatcttttctactatagcatcaaacatggctttagctcctgaggctgatttagactctttgattataagaaatgatcctttgtctggtgctgttattgctgcaattatgcaagaagctggtttaagagctgtcagaaagaacagatatatgatattgcaaagtgacttggaagaagcatacacatctcaagtcaaatctggaactgaacatgacaaattcgatttctacaaatga

SEQ ID NO: 5641 - protein, 416 aa, Debaryomyces hansenii CBS767
MEELGIYESNGKQVHIPINNKGNIKPNHNEENSDVYLKLKKLEKELDLLMLQEDYIKDEQRHLKRELVRAQEEVKRIKSVPLVIGQFLEPIDENTGIVSSTTGSNYVVRILSTLDRELLKPSSSVALHRHSNALVDTLPPEADSSISIVGDEQKPDVTYADVGGLDMQKQEIREAVELPLTQGDLYSQIGIDPPRGVLLYGPPGTGKTMLVKAVANSSTASFIRINGSEFVQKYLGEGPRMVRDVFRLARENSPAIIFIDEIDAIATKRFDAQTGADREVQRILLELLNQMDGFDQNSTVKVIMATNRHDTLDPALLRPGRLDRKIEFPSLKDRRERRLIFSTIASNMALAPEADLDSLIIRNDPLSGAVIAAIMQEAGLRAVRKNRYMILQSDLEEAYTSQVKSGTEHDKFDFYK

SEQ ID NO: 5642 - DNA, 1215 bp, Yarrowia lipolytica CLIB122
  CDS (1)..(1215)
atgaccatagaaattgcgaaacctgccggcgagcattctctaccttcctcggcgacccccgaggactattaccgtcgattgaagcagctggagcgggaatacgaacttatctctcttcaggaagagtacatcaaagacgagcagcgccacctgaagcgcgagctggtgcgagcccaggaggaggtcaagcggatccagtcggtgccactggtgattggacagtttctggagcccattgatcaacaaacaggtattgtggcgtccaccaccggctccaactatgtcgtgagaatcctgtccacactcgatcgggagctgctcaagccctcgtcatcggtggcgttgcatcgacactccaacgcgctggtcgacattctgcctccggaggctgattcgtctatcgccatgctgcggcctgatgagaagcccgatgtctcctacgccgacgtgggaggccttgacatccagaagcaggagatccgggaggctgtggagctgcctctaacacaatttgagctctacaaacagattggtattgatcctcctcgaggtgttctgctttttggccctcctggaaccggcaagaccatgctggtcaaggcggtggcaaacaacaccacggcatcgttcattcgagtggtgggctccgagtttgtgcaaaagtatctgggagagggtcctcgaatggtcagagacattttccgactggcccgagaaaactcgccatccatcattttcatcgacgagatcgacgccatcgccacgaagcgtttcgatgcacagaccggtgccgacagagaggtccagcgtatcctgctggagctgctcaaccagatggacggtttcgaccagacctccaacgtcaaggtgatcatggccaccaaccgagcagacacactggatcctgctctgctgcgtcccggtcgactggaccgaaagatcgagttccccaacctgcgagaccgccgagaacgacgtctgattttctccaccatcgcctccaagatgtctctggctcccgagtgtgacctggacgctctcatcattcgaaacgaccctctttctggtgccatcatcgcggccatcatgcaggaggccggtctgcgggccgttcgaaagaatcgatacgtcatcatccagagcgatctggaggaggcctactctgcccaggtcaaggtgggaagcgacaaggacaagtttgagttctacaagtaa

SEQ ID NO: 5643 - protein, 404 aa, Yarrowia lipolytica CLIB122
MTIEIAKPAGEHSLPSSATPEDYYRRLKQLEREYELISLQEEYIKDEQRHLKRELVRAQEEVKRIQSVPLVIGQFLEPIDQQTGIVASTTGSNYVVRILSTLDRELLKPSSSVALHRHSNALVDILPPEADSSIAMLRPDEKPDVSYADVGGLDIQKQEIREAVELPLTQFELYKQIGIDPPRGVLLFGPPGTGKTMLVKAVANNTTASFIRVVGSEFVQKYLGEGPRMVRDIFRLARENSPSIIFIDEIDAIATKRFDAQTGADREVQRILLELLNQMDGFDQTSNVKVIMATNRADTLDPALLRPGRLDRKIEFPNLRDRRERRLIFSTIASKMSLAPECDLDALIIRNDPLSGAIIAAIMQEAGLRAVRKNRYVIIQSDLEEAYSAQVKVGSDKDKFEFYK

SEQ ID NO: 5644 - DNA, 1311 bp, Yarrowia lipolytica CLIB122
  CDS (1)..(1311)
atgggtaaccgaccatcactccccggagacaagaagaaggacgacaagaagaacgagaagcccaagtatgagcctcccgtgaacacacgatcgcatcgaaagaagaagaagggccccgaaaacgccaacaaactgcccggcgtgtaccccacgacacgatgcaagctcaagctgctcaagatggagcgaatcaaggatcatctgctgctggaggaagagtttgtgcagaatcaggagcgtctcaacccgctggacgacaaggttgccgaggagcgatcaaaggttgacactctgagaggttctcccatgggcgtgggcactctggaggagatcatcgacgacgatcatgccattgtctcgtccacttctggccccgagtactacgtttcgatcatgtcttttgttgataaggatcttctagaacccggctgttctgttttgctgcaccacaagactgtgtctgtcgttggagtgctgcaagacgatgccgaccccatggtctcggtaatgaagttggacaaggcccccacagagtcgtatgccgatattggaggtctggagtcgcagattcaggaaattaaggagtccgtggagctgccactcacacatccagagctctatgaagagatgggtatcaaaccccccaagggagtcattctttacggcgctcccggaaccggaaagacactgctggccaaggccgtcgccaaccagacttctgctacatttttgcgaatcgttggatccgagctgatccaaaagtacttgggagacggtccccgactgtgtcgacagattttccagattgccgcagaacacgcaccgtccattgttttcatcgatgagattgacgctattggaaccaaacgatacgagtcgacgtctggcggagagcgagaggtgcagcggaccatgctggagcttctgaaccagctggatggattcgacgaccgaggagacgtcaaggtaattatggctacaaacaagattgagtcgctggaccctgcactgattcgacctggtcgaatcgaccgaaagattctgtttgagaatcccgactccaccaccaagcgaaagattatgggcatccacacctccaagatgaacctcaacgacgatgttgatctcgaggagtttgtgtcttccaaggatgaactttctggagccgacatcaaggccatgtgcaccgaggcaggtctgcttgctctgcgagagagacgaatgcgggtcactgctgaggatttccgaaccgctaaagagcgggtcatgaagaacaaggtggaggagaaccttgagggtctctacctgtaa

SEQ ID NO: 5645 - protein, 436 aa, Yarrowia lipolytica CLIB122
MGNRPSLPGDKKKDDKKNEKPKYEPPVNTRSHRKKKKGPENANKLPGVYPTTRCKLKLLKMERIKDHLLLEEEFVQNQERLNPLDDKVAEERSKVDTLRGSPMGVGTLEEIIDDDHAIVSSTSGPEYYVSIMSFVDKDLLEPGCSVLLHHKTVSVVGVLQDDADPMVSVMKLDKAPTESYADIGGLESQIQEIKESVELPLTHPELYEEMGIKPPKGVILYGAPGTGKTLLAKAVANQTSATFLRIVGSELIQKYLGDGPRLCRQIFQIAAEHAPSIVFIDEIDAIGTKRYESTSGGEREVQRTMLELLNQLDGFDDRGDVKVIMATNKIESLDPALIRPGRIDRKILFENPDSTTKRKIMGIHTSKMNLNDDVDLEEFVSSKDELSGADIKAMCTEAGLLALRERRMRVTAEDFRTAKERVMKNKVEENLEGLYL

SEQ ID NO: 5646 - DNA, 1317 bp, Cryptococcus neoformans var. neoformans JEC21
  CDS (1)..(1317)
atgggtcaagcaccatccagcggcgctggaaacaataagaaaggcaactccaaagacaacaaagacaagcctaagtgggagccccctgtgcctactcgtatcggtaagaagaagagacgcggacccgatgcgtcgtcccgacttccagctgtatatcccaccactcgatgcaaactcaagttattgaagatggagaggatacaagactaccttctcatggaagaggaatttgtgtctaatcaggcatcgcagtctggtgaagataggacggcggcagatcgaactcgggtggacgagcttcgtggctcgcctatgggagtcggcactttggaagagatcattgatgacgatcacgccattgtgtcttccggaggtggatctgaatactatgttgggatcatgtccttcgttgataaggacctgcttgaacccggttgctcagttctccttcaccacaagacgcacgctgttgtgggagtgcttgccgatgacaccgatcccatggtctctgtcatgaaacttgataaagcccccactgaaagctatgctgatattggaggcctggaaagtcaaattcaagaaatcaaagagtcagttgaacttccacttacacaccccgaactttatgaagagatgggcatcagaccgcccaaaggtgttatcttgtatggagtacctggtactggaaagactcttcttgcaaaagccgtcgccaatcagacatctgcaacatttcttcgtatagtcggctccgaactcattcaaaagtatcttggcgatggtccaaagcttgttcgggaactattcagggtggctgaggaaaacgccccaagcatcgtcttcatcgatgagattgatgccatcgggacaaaaagatatgactcgacatccagtggcgaacgggagatacagcgtacaatgctggagctgttaaatcagctggacggttttgatacgcggggtgatgttaaagtcataatggcaaccaacaagattgaaaatctcgaccctgcgctgattcgtccaggtcgaatagacaggaaaattgaattccctcttcctgatacaaagactaagagacacatctttaaattacacacatcgcgaatgtctttggcagatgatgtggacatcgaggaattagtcatgaccaaggatgaactatctggggcagacattaaagccgtttgcaccgaggccggtttgctggcattgagggaaaggcgaatgagggttactcgtaccgatttcaccacagcacgagaaaaagtcctgtatggaaaagacgagaatactcccgcaggcctgtatctctaa

SEQ ID NO: 5647 - protein, 438 aa, Cryptococcus neoformans var. neoformans JEC21
MGQAPSSGAGNNKKGNSKDNKDKPKWEPPVPTRIGKKKRRGPDASSRLPAVYPTTRCKLKLLKMERIQDYLLMEEEFVSNQASQSGEDRTAADRTRVDELRGSPMGVGTLEEIIDDDHAIVSSGGGSEYYVGIMSFVDKDLLEPGCSVLLHHKTHAVVGVLADDTDPMVSVMKLDKAPTESYADIGGLESQIQEIKESVELPLTHPELYEEMGIRPPKGVILYGVPGTGKTLLAKAVANQTSATFLRIVGSELIQKYLGDGPKLVRELFRVAEENAPSIVFIDEIDAIGTKRYDSTSSGEREIQRTMLELLNQLDGFDTRGDVKVIMATNKIENLDPALIRPGRIDRKIEFPLPDTKTKRHIFKLHTSRMSLADDVDIEELVMTKDELSGADIKAVCTEAGLLALRERRMRVTRTDFTTAREKVLYGKDENTPAGLYL

SEQ ID NO: 5648 - DNA, 1323 bp, Apis mellifera
  CDS (1)..(1323)
atgggacaaaatcagtctggtactggtggtacaggaagtgataaaaaggatgataaggataaaaaaaagaaatatgaaccacctattccaacaagagtgggtaaaaagaaaagacgtacaaaaggaccagatgctgctttaaaattaccacaagttacaccacatacacgttgcagattaaaacttttaaagttagaacgtataaaagattatttattaatggaagaggaatttattagaaatcaagaaagattaaagccacaagaagaaaaaaatgaagaagaaagatctaaagttgatgatttacgtggaactcctatgtctgtcgggacattagaagaaataattgatgataatcatgcaatagtatctacatctgttggctctgaacattatgtatcaattttatcatttgtagataaggatcagttagaacctggatgttcagttttattaaatcataaagttcatgctgttgttggagttttaggagatgatacagatcctatggttacagtaatgaagttggagaaagctccacaagaaacttatgcagatattggtggacttgatacacaaattcaagaaattaaggaatctgtagaattacctttaacacatccagaatattatgaagaaatgggtattaaacctccaaaaggagttatactttatggtcctccaggaactggaaaaacattgttggcaaaagctgttgctaatcaaacttcagcaacttttttaagagtcgttggttccgaacttatacaaaaatatttaggagatggtcctaaacttgttagagagctatttagagttgcagaagaacatgctccttcaattgtatttatagatgaaatagatgctgtaggtaccaaacgatacgatagcaatagtggaggtgaacgtgaaattcaaagaactatgttagaacttctcaatcaacttgatggttttgatagtcgaggagatgttaaagtggtaatggctacaaatagaattgaaactttagatccagcattaatcagaccaggtcgaattgatagaaaaatagaatttccattgccggatgaaaaaacaaaacggagaatattcagcattcatactagtagaatgactttagcacctgatgtaaatttagcagaattaattatggctaaagatgatctttcaggtgcagatataaaggctatatgtactgaagctggtttaatggcattacgtgaacgtcgtatgaaagttactagcgatgattttaaaaaatctaaagaaagcgttttgtatcggaaaaaggaaggatctcccgaaggattatatttataa

SEQ ID NO: 5649 - protein, 440 aa, Apis mellifera
MGQNQSGTGGTGSDKKDDKDKKKKYEPPIPTRVGKKKRRTKGPDAALKLPQVTPHTRCRLKLLKLERIKDYLLMEEEFIRNQERLKPQEEKNEEERSKVDDLRGTPMSVGTLEEIIDDNHAIVSTSVGSEHYVSILSFVDKDQLEPGCSVLLNHKVHAVVGVLGDDTDPMVTVMKLEKAPQETYADIGGLDTQIQEIKESVELPLTHPEYYEEMGIKPPKGVILYGPPGTGKTLLAKAVANQTSATFLRVVGSELIQKYLGDGPKLVRELFRVAEEHAPSIVFIDEIDAVGTKRYDSNSGGEREIQRTMLELLNQLDGFDSRGDVKVVMATNRIETLDPALIRPGRIDRKIEFPLPDEKTKRRIFSIHTSRMTLAPDVNLAELIMAKDDLSGADIKAICTEAGLMALRERRMKVTSDDFKKSKESVLYRKKEGSPEGLYL

SEQ ID NO: 5650 - DNA, 1383 bp, Aspergillus nidulans FGSC A4
  CDS (1)..(1383)
atgggtaaccagcagtccaacatcggcggcggccacgacggcaaagacgataaggataagaagaaggacaagcctaagtacgagccgccaccacctccgaccactcgtatcggtcgtaaaaagcgcaaggctgccgggcccagcactgcttccaagctcccagatatcttcccaacgtcacgatgtaaattacgatatctgcgaatgcagcgcgtccacgaccaccttcttctggaggaagagtacgtggaaaacatggagcggctgcggaaagccaaagcgtctgcttccgactccgccaaccgaggagacgttgatattaccgatagaaacgcggatgagcgcagccgggttgatgacatgaggggaagcccgatgggtgttggtaacctggaggagttgattgacgatgaccacgccattgtttcgagcgctaccggcccagaatactacgtgtctatcatgtcttttgtcgacaaggacctcctggagcctggagctagcatccttctgcatcacaagacagtctcggttgttggtgtgctgacggaagagtcggatccgctggtttcggtgatgaaactcgacaaggcgccaaccgagtcatatgccgatattggtggtcttgaatcgcaaattcaagaggttcgagaatcggtcgaacttccgctgcttcatcccgagctgtatgaggagatgggtattaaaccgccaaagggtgtcatcctctacggagctcctggaactggaaagacactgcttgccaaggctgttgccaaccagaccagtgcgacattcttgcgaattgttggaagtgagttgattcaaaagtaccttggagatggtccccgtttggtgcgacagatcttccaggtagcggccgaacatgcgccgtccattgtcttcattgatgaaattgatgctatcggtacgaaacgttatgactcaacttctggcggcgaaagagaaatccagcgaacgatgcttgagcttctcaaccagttagatggattcgacgaccgcggagacgtcaaggtgatcatggctacaaacaagatcgagaccctcgaccctgctttgattcgtcctggccgtattgaccgaaagattctgtttgagaatccagatcaaaacaccaagaagaagatcttcactctccatacctcgaagatgtccctcggagacgatgtcgaccttgacgagttcattaaccaaaaggatgacctctctggtgctgatatccgcgccatttgcacagaagctggtttgatggccctgagagagcgccgcatgagggtgcagatggacgatttccgtgccgctcgcgagcgtatcatgaagacgaagcaggacggcggtcctgtggaaggcttgtatttgtag

SEQ ID NO: 5651 - protein, 460 aa, Aspergillus nidulans FGSC A4
MGNQQSNIGGGHDGKDDKDKKKDKPKYEPPPPPTTRIGRKKRKAAGPSTASKLPDIFPTSRCKLRYLRMQRVHDHLLLEEEYVENMERLRKAKASASDSANRGDVDITDRNADERSRVDDMRGSPMGVGNLEELIDDDHAIVSSATGPEYYVSIMSFVDKDLLEPGASILLHHKTVSVVGVLTEESDPLVSVMKLDKAPTESYADIGGLESQIQEVRESVELPLLHPELYEEMGIKPPKGVILYGAPGTGKTLLAKAVANQTSATFLRIVGSELIQKYLGDGPRLVRQIFQVAAEHAPSIVFIDEIDAIGTKRYDSTSGGEREIQRTMLELLNQLDGFDDRGDVKVIMATNKIETLDPALIRPGRIDRKILFENPDQNTKKKIFTLHTSKMSLGDDVDLDEFINQKDDLSGADIRAICTEAGLMALRERRMRVQMDDFRAARERIMKTKQDGGPVEGLYL

SEQ ID NO: 5652 - DNA, 1206 bp, Candida albicans SC5314
  CDS (1)..(1206): transl_table=12
atgactacttcaattgataaatcttatgttcatgaaggtggtataagaccatattttgaacaacaaatacaagatacggaaataagaatacagcaaaccacacagaacttgcgtcgtttggaagcccaacgtaacaaattgaataacaaagtcagacaattaaaggatgaattaaaattattacaagaacctggatcatatgtaggtgaagttgttaaagttatgggcttgaaaaaagttttagtgaaaatccatcctgaaggtaaattcattgtcaatgttaccaaagatatcgatgtcaagaaattgactccatcaataagagtgtgtttgaaaccagattctcacgatttgtacaaaatattacccaccaaagttgatcctttggtttcattgatgatggttgaaaaagtcccagactcaacatacgatatggttggtgggttagataaacaaattaaagaaatcaaagaagttattgaattacctgtcaaacatccagaattgtttgaaagtttgggtatagctcaaccaaaaggtgttatattgtatggaccaccaggtacaggtaagaccttattggcaagagcagttgctcaccataccgaatgtaaattcattcgtgtttctggttcagaattagtgcaaaagtatattggggaagggtctcgtatggttagggagttgttcgtgatggcaagagaacatgcaccatcaatcatttttatggatgaaattgattctattgggtcgtcgcgtgttgaaggttcatcaggaggtgattccgaagtgcaaagaacaatgttggaattgttaaatcaattggatgggtttgaaagttcaaaagatatcaaaatcattatggccactaatcgtttagatattttggatccagctttattgagaccaggtagaattgatagaaaaattgaattcccagcaccaaccgttgctgctagaacagatattttaaagattcattcaagatccatgaatttgacaagaggtattaatttgcgtaaaattgctgagaaaatgaatggatgcagtggtgctgatgtgaaaggagtttgtaccgaagctggtatgtatgcattgagagaaagaagaattcatgtaactcaagaagatttcgaattggcagttgcaaaagtcatgtctaagaatgacgatggtgctgtctccttacagaaattattcaaataa

SEQ ID NO: 5653 - protein, 401 aa, Candida albicans SC5314
MTTSIDKSYVHEGGIRPYFEQQIQDTEIRIQQTTQNLRRLEAQRNKLNNKVRQLKDELKLLQEPGSYVGEVVKVMGLKKVLVKIHPEGKFIVNVTKDIDVKKLTPSIRVCLKPDSHDLYKILPTKVDPLVSLMMVEKVPDSTYDMVGGLDKQIKEIKEVIELPVKHPELFESLGIAQPKGVILYGPPGTGKTLLARAVAHHTECKFIRVSGSELVQKYIGEGSRMVRELFVMAREHAPSIIFMDEIDSIGSSRVEGSSGGDSEVQRTMLELLNQLDGFESSKDIKIIMATNRLDILDPALLRPGRIDRKIEFPAPTVAARTDILKIHSRSMNLTRGINLRKIAEKMNGCSGADVKGVCTEAGMYALRERRIHVTQEDFELAVAKVMSKNDDGAVSLQKLFK

SEQ ID NO: 5654 - DNA, 1206 bp, Candida albicans SC5314
  CDS (1)..(1206): transl_table=12
atgactacttcaattgataaatcttatgttcatgaaggtggtataagaccatattttgaacaacaaatacaagatacggaaataagaatacagcaaaccacacagaacttgcgtcgtttggaagcccaacgtaacaaattgaataacaaagtcagacaattaaaggatgaattaaaattattacaagaacctggatcatatgtaggtgaagttgttaaagttatgggcttgaaaaaagttttagtgaaaatccatcctgaaggtaaattcattgtcaatgttaccaaagatatcgatgtcaagaaattgactccatcaataagagtgtgtttgaaagcagattctcacgatttgtacaaaatattacccaacaaagttgatcctttggtttcattgatgatggttgaaaaagtcccagactcaacatacgatatggttggtgggttagataaacaaattaaagaaatcaaagaagttattgaattacctgtcaaacatccagaattgtttgaaagtttgggtatagctcaaccaaaaggtgttatattgtatggaccaccgggtacaggtaagaccttattggcaagagcagttgctcaccataccgaatgtaaattcattcgtgtttctggttcagaattagtgcaaaagtatattggggaagggtctcgtatggttagggagttgttcgtgatggcaagagaacatgcaccatcaatcattttcatggatgaaattgattctatcgggtcttcgcgtgttgaaggttcatcaggaggtgattccgaagtgcaaagaacaatgttggaattgttaaatcaattggatgggtttgaaagttcaaaagatatcaaaatcattatggccactaatcgtttagatattttggatccagcattattgagaccaggtagaattgatagaaaaattgaattcccagcaccaaccgttgctgctagaacagatattttaaagattcattcaagatccatgaatttgacaagaggtattaatttgcgtaaaattgctgagaaaatgaatggatgcagtggtgctgatgtgaaaggggtttgtaccgaagctggtatgtatgcattgagagaaagaagaattcatgtaacacaagaagatttcgaattggcagttgcaaaagtcatgtctaagaatgacgatggtgctgtctccttacagaaattattcaaataa

SEQ ID NO: 5655 - protein, 401 aa, Candida albicans SC5314
MTTSIDKSYVHEGGIRPYFEQQIQDTEIRIQQTTQNLRRLEAQRNKLNNKVRQLKDELKLLQEPGSYVGEVVKVMGLKKVLVKIHPEGKFIVNVTKDIDVKKLTPSIRVCLKADSHDLYKILPNKVDPLVSLMMVEKVPDSTYDMVGGLDKQIKEIKEVIELPVKHPELFESLGIAQPKGVILYGPPGTGKTLLARAVAHHTECKFIRVSGSELVQKYIGEGSRMVRELFVMAREHAPSIIFMDEIDSIGSSRVEGSSGGDSEVQRTMLELLNQLDGFESSKDIKIIMATNRLDILDPALLRPGRIDRKIEFPAPTVAARTDILKIHSRSMNLTRGINLRKIAEKMNGCSGADVKGVCTEAGMYALRERRIHVTQEDFELAVAKVMSKNDDGAVSLQKLFK

SEQ ID NO: 5656 - DNA, 1236 bp, Candida albicans SC5314
  CDS (1)..(1236): transl_table=12
atggaagacccagttctgttagacaacgtaaacagtgtgttatcaaaattgaataacgtttcagctacaaactccaatgaaactgatgtgtatcttaaattgaaaaaattggagaaggagttagatttactattactacaagaagagtacattaaggatgaacaacgtcatttaaagcgtgaattggtgagggcacaagaagaagtcaagagaataaagtctgtgccattagtcattggacaattcttggaaccaatagatgaaaacactggtatagtttcatccaccactggttcaaactatgtcgttaggattttatctacattagatcgtgagttgttaaaggcatcctcttcggttgcattacatcgtcactcaaatgcattggttgacatattgccaccagaagctgactcttctatatcaattgttggagaagaccaaaagccagatgtcacttatgccgatgttggtggtctagatatgcaaaagcaagaaatcaaggaagccgtcgagttgccattgactcaaggtgatttgtattctcaaattggtattgatccacctagaggggtgttgttgtatggtccaccaggtactgggaaaaccatgttagtcaaagctgtggcaaattcaaccacggcttctttcatcagaattaatgggtcagaatttgtacaaaaatacttaggagagggtccaagaatggtgagagatgttttcagattggccagagagaattcaccagcaatcatttttattgatgaaatagatgcaattgctaccaagagatttgatgctcaaactggtgctgatcgtgaagttcaaagaattttgttggagttattgaatcaaatggatgggtttgatcagacatccactgtcaaagttataatggctactaacagagcagatactttagatcctgcattgttgagaccaggtagattagatagaaagattgagtttccttcattgaaagatagaagagaaagaagattgattttttcgacaattgcatcgaagatgtcattagcacctgaagctgatttggactctttaattatcagaaacgatccattgtctggtgcagttattgctgcaattatgcaagaagccgggttaagagctgtgagaaaaaacagatatatgattttgcaaagtgatttggaggaagcttacacttcacaagtaaagacagggacagaacatgataaatttgatttctataagtaa

SEQ ID NO: 5657 - protein, 411 aa, Candida albicans SC5314
MEDPVSLDNVNSVLSKLNNVSATNSNETDVYLKLKKLEKELDLLLLQEEYIKDEQRHLKRELVRAQEEVKRIKSVPLVIGQFLEPIDENTGIVSSTTGSNYVVRILSTLDRELLKASSSVALHRHSNALVDILPPEADSSISIVGEDQKPDVTYADVGGLDMQKQEIKEAVELPLTQGDLYSQIGIDPPRGVLLYGPPGTGKTMLVKAVANSTTASFIRINGSEFVQKYLGEGPRMVRDVFRLARENSPAIIFIDEIDAIATKRFDAQTGADREVQRILLELLNQMDGFDQTSTVKVIMATNRADTLDPALLRPGRLDRKIEFPSLKDRRERRLIFSTIASKMSLAPEADLDSLIIRNDPLSGAVIAAIMQEAGLRAVRKNRYMILQSDLEEAYTSQVKTGTEHDKFDFYK

SEQ ID NO: 5658 - DNA, 1398 bp, Candida albicans SC5314
  CDS (1)..(1398): transl_table=12
atgggtcaaggtccttcaggaataccaggtggcgataatctcaacaaaaagaaagatgataagaaaaaggaaaaaccaaagtacgaaccaccagtggaatcaaagtttggtaaaaagaaaagaaggggccccgatacagcagttaaattacctagcgtgtaccccaacaccagatgtaaattgaaattattaaaattagaaagaatcaaggatcatttgttattggaagaagagtttgttaccaaccaagaagcattccaacctacagaagcaagacaagccgaagaaagagaaaaagttgacgaattgagaggatatccgatggcaattgggacattagaagaaataatcgacgatgatcatgcaattgtgtccagcactgctagttcagagtactatgtgtcaatcatgtcgtttgtagacaaggggttattggaaccaggatgttcagttcttttacatcacaaaacagtagcagtggtaggtgtgttacaagatgatgctgatcctatggtttcggtaatgaaactcgacaaatcccctacagaatcatatgccgacattggggggttggaatcacaaattcaagaaatcaaagaatcagtcgaattgccattgacacatcctgaattgtacgaagaaatgggaatcaagcctccaaaaggtgtgatattatatggggctcccggtaccggtaaaactttgttggccaaagcagttgccaatcaaacaagtgccactttcttgagaattgtcggatcggagttgatccagaaatatctaggtgatggtccaaggttgtgtcgtcaaattttccaaattgctgctgatcacgcaccttcaattgttttcattgatgaaatcgatgccattggtacaaagagatacgagtctacatctggtggtgaacgtgaaatccaaagaaccatgttggagttattgaatcagttagatgggttcgatgatagaggtgacatcaaagttattatggctacaaataagatagagtcacttgatcctgcattaatcagacctggaagaatcgatagaaagattttgtttgaaaaccctgacgccaataccaagaaaaagatcttgactattcacacgtcaaagatgagtttggcagatgacgttaacttggatgaaatagtcactggtaaggatgatttgtcgggtgctgatatcaaagctatatgtacagaagcagggttattagcattaagagaaagacgtatgcaagtcaaagctgaagatttcaaatctgcaaaggaaagagtcttgaaaaataaggttgaagaaaacctcgaaggtttgaatttgcaagtgcatagaaatacaattattgtacaacagatttttttttttgtaagtttttttttcctctccatcacttag

SEQ ID NO: 5659 - protein, 465 aa, Candida albicans SC5314
MGQGPSGIPGGDNLNKKKDDKKKEKPKYEPPVESKFGKKKRRGPDTAVKLPSVYPNTRCKLKLLKLERIKDHLLLEEEFVTNQEAFQPTEARQAEEREKVDELRGYPMAIGTLEEIIDDDHAIVSSTASSEYYVSIMSFVDKGLLEPGCSVLLHHKTVAVVGVLQDDADPMVSVMKLDKSPTESYADIGGLESQIQEIKESVELPLTHPELYEEMGIKPPKGVILYGAPGTGKTLLAKAVANQTSATFLRIVGSELIQKYLGDGPRLCRQIFQIAADHAPSIVFIDEIDAIGTKRYESTSGGEREIQRTMLELLNQLDGFDDRGDIKVIMATNKIESLDPALIRPGRIDRKILFENPDANTKKKILTIHTSKMSLADDVNLDEIVTGKDDLSGADIKAICTEAGLLALRERRMQVKAEDFKSAKERVLKNKVEENLEGLNLQVHRNTIIVQQIFFFVSFFFLSIT

SEQ ID NO: 5660 - DNA, 1395 bp, Aspergillus fumigatus Af293
  CDS (1)..(1395)
atgtcgacccttgaagatctggaggatctcgaacgcgaggagagagacaagaagaaggaccagggcgatggtgacggccagcagcctggaggagatggagatgctgaaatgaaagatgccgatgcaaagaagaaggacgaagaagatgatttactggatgaggagattctcaactcgagcacagcagacattgtcaagcggcgacggatgttggagaatgagctccgcataatgaaaagcgaataccaacgattgacccatgaacagaatactatgcgggagaaggtgagggataaccaggagaaaattgagaacaacaggcaacttccatacctcgtcggaaatgtcgtcgagcttttggatctggatgttgaggcagaggccgccgaagaaggagcgaacatcgatcttgacgctacgcgagtgggcaaatccgctgtcatcaaaacatcgaccagacagactatctatcttcctctcatcggtctggtagaccacgagaaactgaagcccggtgacctgatcggtgtcaacaaggattcatacctgattttggatacactacccgccgagtacgataatcgtgtgaaggccatggaggtcgacgagaagccgacagagaagtacacggacattggtggtttggataagcagattgaagagatagtggaagccatcgtatggccgatgaaggaggctgaacgattcacgaagattggtatcaaggcaccaaagggtgctctgatgtatggtcctcctggtaccggtaaaacccttcttgcgcgagcctgcgccgcagagacaaacgcgacgttcctgaagcttgctggacctcagctggtgcagatgttcattggtgacggcgccaagctggttcgggactgcttcgctcttgccaaggagaaggccccttcgatcattttcattgacgaactcgacgccgtgggtaccaagcgtttcgactccgagaagtccggtgaccgtgaggtgcaacggaccatgttggagcttctgaaccagcttgatggatttgcttcggatgatcgtatcaaggtcctggctgcgacaaaccgtatcgatgtccttgatcctgctctgctccgttccggtcgactggaccgcaagatcgaattccctctccccaatgaggaggcacgggcaaacatcctgcagatccactcccgcaagatggctgtggacgacgccgtcaactgggccgaattggctcgaagtactgatgagttcggtggtgcgcagctgaaggccgtctgtgtggaagccggtatgattgctctccggaaaggcatgagcaaggtcggacacgagaactacgtggatgctatcgccgaggtgcaagccaagaagaaggatacaaatatgggtatttatgtctag

SEQ ID NO: 5661 - protein, 464 aa, Aspergillus fumigatus Af293
MSTLEDLEDLEREERDKKKDQGDGDGQQPGGDGDAEMKDADAKKKDEEDDLLDEEILNSSTADIVKRRRMLENELRIMKSEYQRLTHEQNTMREKVRDNQEKIENNRQLPYLVGNVVELLDLDVEAEAAEEGANIDLDATRVGKSAVIKTSTRQTIYLPLIGLVDHEKLKPGDLIGVNKDSYLILDTLPAEYDNRVKAMEVDEKPTEKYTDIGGLDKQIEEIVEAIVWPMKEAERFTKIGIKAPKGALMYGPPGTGKTLLARACAAETNATFLKLAGPQLVQMFIGDGAKLVRDCFALAKEKAPSIIFIDELDAVGTKRFDSEKSGDREVQRTMLELLNQLDGFASDDRIKVLAATNRIDVLDPALLRSGRLDRKIEFPLPNEEARANILQIHSRKMAVDDAVNWAELARSTDEFGGAQLKAVCVEAGMIALRKGMSKVGHENYVDAIAEVQAKKKDTNMGIYV

SEQ ID NO: 5662 - DNA, 1182 bp, Aspergillus fumigatus Af293
  CDS (1)..(1182)
atgaacggcggaagcgaccctgagagagagcaggcgctcgaagattacaagaagagcttactagagcttcgagaatgggaagctaagcttaagaacctgcgtatgggtatcaaggacctgcagagagagttcgatatctctgaagagaacatcaaggccttgcagagtgtcggtcagatcattggcgaagtgctgaaacaactggatgaggagcgattcatcgttaaggcgtcatccggtccccgatatgttgtcggctgccgctccaaggtcgataaatcgaaactgaaacagggcactcgtgttgcccttgacatgacaacacttaccatcatgcgcatgcttccgcgtgaagttgatccgctggtatacaacatgtcgttggaggaccctggtcagatcagcttcgcgggtatcggtggtctgaacgaccaaatcagagagcttcgagaagtgatcgagttgccattgaagaaccccgaactattccagagagtcggtatcaagccgcccaaaggtgtattactgtacggtcctcccggtaccggaaagacattgctggcacgagccgtggcgagctcgatggaaaccaattttctgaaggtggtttcatccgcgatcgtcgacaagtacattggtgaatccgcgcggttaataagagagatgttcggttatgcaaaggaacacgagccctgtattatcttcatggacgaaattgacgccatcggtggcaggcgtttctctgagggtacctcggctgatagagaaatccagagaacactgatggagcttctgaaccagctggatggtttcgactacctcggaaagacgaagatcatcatggcgaccaaccgaccagatacccttgacccggctttgctccgtgccggtcgtctggaccggaagattgagattccccttcccaacgaggttggccgtctggaaatcctgaagatccactccagcaccgttcagctggagggcgagattgattttgaaagcgttgtaaagatgagcgacggactcaacggtgccgatctgcgtaacgtggttacggaagctggacttttcgccatcaaggactatcgggacgcgatcagccaggacgacttcaacaaggcggttcgcaaggtcgctgaggccaagaagctggaaggcaagcttgaataccagaaactgtag

SEQ ID NO: 5663 - protein, 393 aa, Aspergillus fumigatus Af293
MNGGSDPEREQALEDYKKSLLELREWEAKLKNLRMGIKDLQREFDISEENIKALQSVGQIIGEVLKQLDEERFIVKASSGPRYVVGCRSKVDKSKLKQGTRVALDMTTLTIMRMLPREVDPLVYNMSLEDPGQISFAGIGGLNDQIRELREVIELPLKNPELFQRVGIKPPKGVLLYGPPGTGKTLLARAVASSMETNFLKVVSSAIVDKYIGESARLIREMFGYAKEHEPCIIFMDEIDAIGGRRFSEGTSADREIQRTLMELLNQLDGFDYLGKTKIIMATNRPDTLDPALLRAGRLDRKIEIPLPNEVGRLEILKIHSSTVQLEGEIDFESVVKMSDGLNGADLRNVVTEAGLFAIKDYRDAISQDDFNKAVRKVAEAKKLEGKLEYQKL

SEQ ID NO: 5664 - DNA, 1527 bp, Aspergillus fumigatus Af293
  CDS (1)..(1527)
atggcgacaacagcttacctgagagctctccgtccatctctccagcggaagcttcactcacttacgttcacgccttcatccaccctcttaacatcaaccgccctttttaacgactcttctggtagcaaggttgctgttggtaaccagcagtcaaacatcggtggaggccccggcggggatgggagagatgacaaggataagaagaaggagaagcccaagtacgaaccaccaccaccacctaccaccaggattgggcggaagaagcgcaaggctgccggccctagcgctgcctcaaaactccccgacatttttcctacgtcacgatgtaaattacgataccttcgaatgcaacgagtccatgaccacctgttgctcgaagaggaatatgtggagaacatggagcgtctgcgtaaggccaaagctcaggcaacgctggactccgtgagccgaggtgacctggatatcatggacaggaatgcggacgaaaggagccgtgtggatgacatgagaggcagccccatgggagttggtaacctggaggagctaattgacgatgaccatgcgattgtctcgagtgccaccggccccgagtactacgtttctatcatgtcatttgtcgacaaggatctgctggagcctggtgccagcatccttctgcatcacaagtctgtatctgtcgtcggtgtgctgacggaagagtccgatcctctggtctcagtcatgaagctcgacaaggcaccaaccgagtcgtacgcagatattggtggtctcgagtcgcagattcaagaagtccgagagtctgtcgagttgcccttgctccacccggaactgtatgaggagatgggtatcaagccgccaaagggcgtcattctctacggtgctccaggtaccggtaaaaccttgcttgccaaggctgttgcaaaccagaccagcgccactttccttcgaatcgtcggaagtgagctgatccagaaatatctgggagatggtcctcggttggtgcgacagattttccaggtcgctgctgagcatgcgccctcgattgtcttcatcgatgaaattgatgccatcggtaccaagcgctacgactctacatctggtggtgaacgagaaatccagcgtactatgttggagcttcttaaccaactggatggtttcgacgaccgtggtgatgtaaaggttattatggccacaaacaagattgagactctggatcctgccttgatccgtcctggtcgtattgaccgaaagattctcttcgaaaacccagaccaaaataccaagaagaagatcttcacccttcacacgtccaagatgtcccttgcggatgacgttgacctcgatgaattcatcaaccagaaagacgatctctctggtgctgatatccgagctatttgcacagaagccggtctgatggcgctgagagagcgccgtatgagggtgcaaatggatgatttccgtgccgcaagggaacggatcatgaagactaagcaggatggcggtcctgtggagggcttgtatttgtaa

SEQ ID NO: 5665 - protein, 508 aa, Aspergillus fumigatus Af293
MATTAYLRALRPSLQRKLHSLTFTPSSTLLTSTALFNDSSGSKVAVGNQQSNIGGGPGGDGRDDKDKKKEKPKYEPPPPPTTRIGRKKRKAAGPSAASKLPDIFPTSRCKLRYLRMQRVHDHLLLEEEYVENMERLRKAKAQATLDSVSRGDLDIMDRNADERSRVDDMRGSPMGVGNLEELIDDDHAIVSSATGPEYYVSIMSFVDKDLLEPGASILLHHKSVSVVGVLTEESDPLVSVMKLDKAPTESYADIGGLESQIQEVRESVELPLLHPELYEEMGIKPPKGVILYGAPGTGKTLLAKAVANQTSATFLRIVGSELIQKYLGDGPRLVRQIFQVAAEHAPSIVFIDEIDAIGTKRYDSTSGGEREIQRTMLELLNQLDGFDDRGDVKVIMATNKIETLDPALIRPGRIDRKILFENPDQNTKKKIFTLHTSKMSLADDVDLDEFINQKDDLSGADIRAICTEAGLMALRERRMRVQMDDFRAARERIMKTKQDGGPVEGLYL

SEQ ID NO: 5666 - DNA, 1398 bp, Aspergillus fumigatus Af293
  CDS (1)..(1398)
atgggagacgtcgccgtggagagctcggcgaccaacgtcacacctagcaagtcggcgccattcgataccatccctaatatagactctctcgaaggcacagatgcagatggaggtgatgagtatgcgactctgaagagactccagagacacttagaatacatccaacttcaagaagaatacattaaggatgaacaaaggagtttgaagcgagagctcgtccgtgcacaggaggagattaaacggatacagagcgtgcctctcgtgatcggacaattcatggaagctatcgatcagaacaccggtatcgtgcagtcgtcaactggctcgaattatgtcgtgcgcatcctttcaacacttgaccgcgagaagctcaagccctcctcctctgtcgccctgcaccgccattccaatgcccttgtcgatattttacctccggaagcagattcgtccattgccatgctcggtgagaacgaaaagccagatgtcacttacgccgacgtcggtggattggacatgcagaagcaggagatcagggaggcagtcgagctacccttgacgcatttcgacctttacaaacagattggtattgatccgcctcgtggtgttctactttacggccctcccggtactggtaagacgatgttggtcaaagctgtggcaaatagtacaactgccagctttattcgtgtgaacggttcggagtttgtccaaaaatacttgggagaaggacctcgtatggttcgcgacgtgttcagaatggctcgtgagaactcacccgccattatcttcattgatgaaatcgatgcaattgctaccaaacgattcgatgcccagactggtgccgatcgtgaagttcagcgtatcctgcttgagctcctcaatcagatggacggcttcgaacagacaagcaatgtgaaggtcatcatggccaccaaccgagcggatactctggatccggccctcttacgtccaggtcgtctggatcgtaagattgagtttccgtcgctgcgtgaccgacgggagcgtcgactgatttttaccacaatcgcatcgaagatgtctttgtccccagaggtcgatctggattcactcatcgtacgaaacgagccactctctggtgctgttattgccgccatcatgcaggaagctggactacgtgctgttcgcaagaaccgctacaatatcatccagtctgaccttgaggacgcctatgctgctcaggtcaagaccggccaggaagcggacaggtatgctcttccctgcattcaaatctatctcaccaccagttctaactattgcgttacaggctcgatttctaccggtagattatgtacaatcataggcatttatgaggtgggaacaggacctgtgccacacgaaagaataattatggattga

SEQ ID NO: 5667 - protein, 465 aa, Aspergillus fumigatus Af293
MGDVAVESSATNVTPSKSAPFDTIPNIDSLEGTDADGGDEYATLKRLQRHLEYIQLQEEYIKDEQRSLKRELVRAQEEIKRIQSVPLVIGQFMEAIDQNTGIVQSSTGSNYVVRILSTLDREKLKPSSSVALHRHSNALVDILPPEADSSIAMLGENEKPDVTYADVGGLDMQKQEIREAVELPLTHFDLYKQIGIDPPRGVLLYGPPGTGKTMLVKAVANSTTASFIRVNGSEFVQKYLGEGPRMVRDVFRMARENSPAIIFIDEIDAIATKRFDAQTGADREVQRILLELLNQMDGFEQTSNVKVIMATNRADTLDPALLRPGRLDRKIEFPSLRDRRERRLIFTTIASKMSLSPEVDLDSLIVRNEPLSGAVIAAIMQEAGLRAVRKNRYNIIQSDLEDAYAAQVKTGQEADRYALPCIQIYLTTSSNYCVTGSISTGRLCTIIGIYEVGTGPVPHERIIMD

SEQ ID NO: 5668 - DNA, 1155 bp, Ustilago maydis 521
  CDS (1)..(1155)
atggcggcggaagaggacacatatcttcgcttcaaaaagttgcaacaacacctcgagtttctcaacaccatggaggagtacgttaaagatgaacagagaaacttgaaacgcgagctggtgagagcgcaagaggaggtgaagcgcatccagtcggttcccctcgtcatcggccagttcctcgagccgatcgaccagcacacgggtattgttggttccaccacaggctctaactatgtcgtacgcatcctttctacaatcgatcgcgagctgctcaaggccagctcaagtgtagcgctgcaccgtcactcgaacgcgttggtggatgtgctgccaccagaggccgactcgtcgatcgccatgctcggacaggacgaaaagccaacagagacctaccaggatattggtggcatggacatccagaagcaggagatccgagaagcagtcgagctgccattggtacaatttgacctttaccgccagatcggtatcgatccacctcgcggcgtgttgctctatggtccaccaggaacaggaaagacgatgctagtcaaggcggtggccaacgccaccactgcgagcttcattcgcgtcgtaggttcggaatttgtgcagaaatacctgggcgaaggcccaaggatggtacgtgacgtcttccgacttgcacgcgaaaacgcgcccgccatcatctttatcgacgaaatcgacgctatcgccaccaaacgtttcgatgcgcagacgggtgcggatcgcgaagtgcagcgtatcctgctcgagctgctcaaccagatggacggtttcgatcaaggcagtaacgtcaaggtcatcatggccactaaccgagccgacacgctcgacccagcattactgcgtcccggtcgtctggaccgaaagatcgaattccccacaccatcacgtcgtgagaagcgtctcatcttccagaccatctgcggtaagatgaacctcagcccagaggtggatctggaggactatgttggacgacctgacaagctttccagtgccgaaattgccagcatctgccaagctgccggtttgcaggcgaggatttcgaggaggcctggaagcagattgtcaagaagccggacgattccaagatggagttctaccagtatcgaaaagtggctcagaggcctgtga

SEQ ID NO: 5669 - protein, 384 aa, Ustilago maydis 521
MAAEEDTYLRFKKLQQHLEFLNTMEEYVKDEQRNLKRELVRAQEEVKRIQSVPLVIGQFLEPIDQHTGIVGSTTGSNYVVRILSTIDRELLKASSSVALHRHSNALVDVLPPEADSSIAMLGQDEKPTETYQDIGGMDIQKQEIREAVELPLVQFDLYRQIGIDPPRGVLLYGPPGTGKTMLVKAVANATTASFIRVVGSEFVQKYLGEGPRMVRDVFRLARENAPAIIFIDEIDAIATKRFDAQTGADREVQRILLELLNQMDGFDQGSNVKVIMATNRADTLDPALLRPGRLDRKIEFPTPSRREKRLIFQTICGKMNLSPEVDLEDYVGRPDKLSSAEIASICQAAGLQARISRRPGSRLSRSRTIPRWSSTSIEKWLRGL

SEQ ID NO: 5670 - DNA, 1317 bp, Ustilago maydis 521
  CDS (1)..(1317)
atgggtcaagctcctagcggtggagcgcccggtcgcggaggcaaagacaacaaaaaggatcaacagaagaagtgggaacctcctcttccaacacgtgtcggcaagaagaagaagcgcggtcctgactcgtcgtccaagctccccacggtctaccccaacacacgatgccgattgaagctgctcaagctcgaacgaatcaaggatcatctcttgctcgaggaggaattcgtgcagaaccaggagcgactcaaaccgcaggaggacaaggacgcagaggagcgtacaagggtcgatgacctcagaggtagccctatggctgtaggaacgctcgaggaaattatcgacgacgagcatgccattgtcagcagcgcaacgggtccagagtactatgtcagcatcatgagctttgtcgacaaagacctgctcgaaccgggctgcagcgtactgcttcaccacaaggctatggcgatcgttggtgttctttcggacgatgccgatcccatggttagtgtcatgaagctcgacaaggcgccttccgagagctacgccgacattggaggtctcgaaacccaaattcaggagatcaaggaagccgtcgaactaccgctcacccacccagaactttacgaagagatgggcatcaggccgccgaaaggtgtcatcctctacggtgttcctggcacgggcaagacgctgctcgccaaggcggttgccaaccagacctcggccaccttcctgcgcgtggtcggctccgagctcattcaaaaatacctgggtgatggtcccaaacttgtacgtgagctgttccgcgttgccgacgagcatgctcccagcattgttttcatcgatgagattgacgctgtaggcaccaaacgatacgactcaaattcaggaggagagagagagatccagcgtacactcttggaactactcaaccagctcgacggtttcgacacgagacacgacgtcaaggtgatcatggccaccaaccgaatcgagtcgctcgaccctgcgctcatccgaccgggccgaattgaccgaaagatcgagtttcctctgcctgaccaaaagaccaagatgcacatcttcaagcttcacacatcgcgtatgaacctcgactcggacgtggacctggaagagtttgtcgccatgaaagacgacctctcgggtgccgatatcaagtcgctcgttaccgaggcaggtttgttggcgttgcgagagaggcggatgcgtgtgaccaagaaggactttaccacggcgcgtgagcgtgttatcgaccgaaagaatgagggcactcccgagggtctttatctttaa

SEQ ID NO: 5671 - protein, 438 aa, Ustilago maydis 521
MGQAPSGGAPGRGGKDNKKDQQKKWEPPLPTRVGKKKKRGPDSSSKLPTVYPNTRCRLKLLKLERIKDHLLLEEEFVQNQERLKPQEDKDAEERTRVDDLRGSPMAVGTLEEIIDDEHAIVSSATGPEYYVSIMSFVDKDLLEPGCSVLLHHKAMAIVGVLSDDADPMVSVMKLDKAPSESYADIGGLETQIQEIKEAVELPLTHPELYEEMGIRPPKGVILYGVPGTGKTLLAKAVANQTSATFLRVVGSELIQKYLGDGPKLVRELFRVADEHAPSIVFIDEIDAVGTKRYDSNSGGEREIQRTLLELLNQLDGFDTRHDVKVIMATNRIESLDPALIRPGRIDRKIEFPLPDQKTKMHIFKLHTSRMNLDSDVDLEEFVAMKDDLSGADIKSLVTEAGLLALRERRMRVTKKDFTTARERVIDRKNEGTPEGLYL

SEQ ID NO: 5672 - DNA, 1245 bp, Cryptococcus neoformans var. neoformans B-3501A
  CDS (1)..(1245)
atggaagagatcggcattgacctcaaaatggaggatccctccctcccagctcaaatctcggagaagcaaaatctcctcaactctctgcctagtggcagtgaagaactctacagtacttggaagaggcttgaagcccatcgagagtttttacagctccaagaggagtacattcgtgacgagacccagaacctgagaagagaacttttgagggcacaggaagaagtcaagcgaattcaatctgttccattggtcattggccaattcctcgagcccgttgatgaacgacgagccattgttggaagtacaactggctccaattatgttgtccgaatcctttccactctggatcgtgaacttctcaaaccatcttcttctgtggctcttcaccgccactcaaatgctctggtagatattctcccaccagaagcagattcatctattgcgatgttgggagcggatgaaaagccggacgtgaagtactcggacattggtggcctggattcacaaaagcaggaaatcagggaggcggtcgagttgccacttgtacaacaagacctgtacaggaagatcggaatagatccacctagaggcgtgctgctctatggtcctccaggtactggtaagactatgcttgttaaggctgttgccaacgcaaccaaggccgcattcatccgtgtagttggctccgaatttgtgcagaagtatctgggtgaaggtcctcgtatggtccgagacgtttttcgattggcccgagaaaactccccatgcatcatctttatcgatgaagttgacgccattgccacaaagcgtttcgatgctcaaaccggttcggatcgtgaagtgcagcgtatcttgatcgagctacttacccaaatggacgggttcgatcaacaaaccaacgtcaaggtcattatggccaccaaccgagcggatactcttgaccctgcgttgcttcgtcctggtcgtttggacaggaagattgagatgcccaatccctctagacgtgagaggcgcttgattttccagaccgtcacttctaaaatgaatctgggtcccgacgtcgaccttgaggattacgtgtcccgaccggacctgctcagttctgctcaaattgcctccatctgtcaagccgccggtctccaagctgtgcgaaagaaccgatatgtcattttgcccattgattttgaggaagcctggaagtctgtcgtcaagcgtaacgacgagactcacgagttttatcggtaa

SEQ ID NO: 5673 - protein, 414 aa, Cryptococcus neoformans var. neoformans B-3501A
MEEIGIDLKMEDPSLPAQISEKQNLLNSLPSGSEELYSTWKRLEAHREFLQLQEEYIRDETQNLRRELLRAQEEVKRIQSVPLVIGQFLEPVDERRAIVGSTTGSNYVVRILSTLDRELLKPSSSVALHRHSNALVDILPPEADSSIAMLGADEKPDVKYSDIGGLDSQKQEIREAVELPLVQQDLYRKIGIDPPRGVLLYGPPGTGKTMLVKAVANATKAAFIRVVGSEFVQKYLGEGPRMVRDVFRLARENSPCIIFIDEVDAIATKRFDAQTGSDREVQRILIELLTQMDGFDQQTNVKVIMATNRADTLDPALLRPGRLDRKIEMPNPSRRERRLIFQTVTSKMNLGPDVDLEDYVSRPDLLSSAQIASICQAAGLQAVRKNRYVILPIDFEEAWKSVVKRNDETHEFYR

SEQ ID NO: 5674 - DNA, 1332 bp, Strongylocentrotus purpuratus
  CDS (1)..(1332)
atgggtcaaaaccagtcaggaggacctggcgggggtggaaggaatggggacaagaaagatgacaaggacaagaagaagaagtatgagcctccagttcccacccgtgttggcaagaagaagaggaggacgaaaggacctgacacagcaagcaagctaccacaagtcacaccacacacaaaatgcagacttcgccttctcaagatggagcgcatcaaggattatttgttgatggaggaagaattcatccgcaatcaggagagactcaagccacaagaagagaaagatgaggaagagcgttctaaggtggatgatcttagagggacccctatgtcagtaggttctctggaggagatcatcgatgataaccatgccattgtctcggcctcagtaggctcagaatactacgtcagtatcctgtctttcgttgacaaggatcagttggagccaggctgcaccgtcttactaaatcacaaggtgttagctatcgttggagtgctaggggatgacacagaccccatggtgtctgtcatgaagctggagaaggcgccacaagagtcctacgcggacataggaggtctcgacacacaaattcaagagatcaaggaatctgttgagctaccactaacccatcctgagtattatgaagagatgggcatcagacctcccaagggtgtcattctatatggtgctcctggaacaggtaaaactctccttgctaaagctgttgccaatcaaacatcagccacattccttcgtgttgtaggctcagaactcatccagaaatacttgggtgacggaccgaagcttgtaagggagctgttcagagtggctgaagagcatgctccatcaatagtcttcattgatgagatcgatgctattggaacaaagaggtacgagtccaactctggaggagagcgtgaaatccagaggaccatgttagaactactcaatcagttggatgggttcgattctagaggtgatgtcaaggtcatcatggcaaccaataggattgagacacttgaccctgctctcattagaccaggtcgtatcgaccgtaagatcgaatttcccctccccgatgagaagacaaagaggagaattttcaacatccacaccagccgcatgacgctatctaacgatgttaaccttgatgagtatatcacctccaaggatgatctatcaggagctgatattaaggctatatgtacagaggccggtctcatggcattacgtgagcgtaggatgaaggtgaacaatgaagacttcaagaagtcaaaagagaatgtcttgtaccgaaagacagaaggcaccccagaaggactctacctttaa

SEQ ID NO: 5675 - protein, 443 aa, Strongylocentrotus purpuratus
MGQNQSGGPGGGGRNGDKKDDKDKKKKYEPPVPTRVGKKKRRTKGPDTASKLPQVTPHTKCRLRLLKMERIKDYLLMEEEFIRNQERLKPQEEKDEEERSKVDDLRGTPMSVGSLEEIIDDNHAIVSASVGSEYYVSILSFVDKDQLEPGCTVLLNHKVLAIVGVLGDDTDPMVSVMKLEKAPQESYADIGGLDTQIQEIKESVELPLTHPEYYEEMGIRPPKGVILYGAPGTGKTLLAKAVANQTSATFLRVVGSELIQKYLGDGPKLVRELFRVAEEHAPSIVFIDEIDAIGTKRYESNSGGEREIQRTMLELLNQLDGFDSRGDVKVIMATNRIETLDPALIRPGRIDRKIEFPLPDEKTKRRIFNIHTSRMTLSNDVNLDEYITSKDDLSGADIKAICTEAGLMALRERRMKVNNEDFKKSKENVLYRKTEGTPEGLYL

SEQ ID NO: 5676 - DNA, 1362 bp, Encephalitozoon cuniculi GB-M1
  CDS (1)..(1362)
atggctcccatctgcaaacttcagtgggagatggcggcctgcacaggcgacgagtcatcagggtgttcgactctgacatctatatccatgattgcattctccggggcctgtgatccttctgctcttataaaatcgatttgtttgttgaatgaaaatccagtgatcactttaatcccttgtaggatggcggaagggttttgcaaaaacttctacagcaacaagctggatcatctggaggtgcagatagcaaagaagaccaagatacttcgtgtattggaacaaaagcgtgctgagttgaatagaagggttagatttcttagagaagagatatccatcgttcaggagcccagctccaatgttggagtggttgtggaaaaaatgggaaagatgcaggttctggtgaaaacaaatcctgatggtaagtatctagtgaaggtggagcctggagtaaactatgatgaactcaaggctggcgtaagggttgctctgcgtagcgactcatatgatgtccacaggatacttcccacaaaggtggatccgcttgtgtcacttatgatggttgaaaaggttcccgactcgacgtatcaaatgataggaggccttgacgaacagatcaaagagattagggaggtcatcgagcttccaatcaagcatccagagttattcgagaatcttgggatagcgcagccaaagggagtacttttatatgggcctcccggaactggcaagactttactggcaagagccgtggctcatcatacacaatgcaagttcataagggtctctggatctgagctggttcaaaagtacattggagaggggtctaggctggtgagggagctttttatcatggctagagagcatgcaccgtctattatattcatggatgagatcgactccatcgggtccacaaggggagactccaacaaagggagtgacagtgaggtccaacgaaccatgcttgagctactcaatcaactcgacggattcgagtcgcacaacaacatcaaggttatcatggctaccaatagaatcgacattctcgatcctgccctgttgaggactggtagaattgataggaagattgagttccccccgccaaacgaatctgcaagacttgagatcctgaaaatccactcgagaaagatgaatcttaccaagggaattgatcttgagaccatagcaagcaagatggttggatgttctggggcagaagttaaggccgtatgtacagaggctggaatgtatgctttgagggagagaagagttcatgtgacgcaggaagactttgaaatggcagtccataaggtattgaagaagactggggatctgaactctgacctcagaaagcttctaaaataa

SEQ ID NO: 5677 - protein, 453 aa, Encephalitozoon cuniculi GB-M1
MAPICKLQWEMAACTGDESSGCSTLTSISMIAFSGACDPSALIKSICLLNENPVITLIPCRMAEGFCKNFYSNKLDHLEVQIAKKTKILRVLEQKRAELNRRVRFLREEISIVQEPSSNVGVVVEKMGKMQVLVKTNPDGKYLVKVEPGVNYDELKAGVRVALRSDSYDVHRILPTKVDPLVSLMMVEKVPDSTYQMIGGLDEQIKEIREVIELPIKHPELFENLGIAQPKGVLLYGPPGTGKTLLARAVAHHTQCKFIRVSGSELVQKYIGEGSRLVRELFIMAREHAPSIIFMDEIDSIGSTRGDSNKGSDSEVQRTMLELLNQLDGFESHNNIKVIMATNRIDILDPALLRTGRIDRKIEFPPPNESARLEILKIHSRKMNLTKGIDLETIASKMVGCSGAEVKAVCTEAGMYALRERRVHVTQEDFEMAVHKVLKKTGDLNSDLRKLLK

SEQ ID NO: 5678 - DNA, 1383 bp, Neurospora crassa OR74A
  CDS (1)..(1383)
atgtcgacccttgaggaactcgacgacctcgatcgccgtgagcgcgaggacaagaagaaggatcaggacaaggataagaacaacaagaaagagggagatggcgatgccgagatgaaggatgccgagcccgaggccgatgacatcctagatgaggagatcctgagtttgagcacagaggacatcctgatgcggaagcgcctcctcgagaacgatgccagaatcatgaagagcgaataccagcggttatcacatgagagggctaccatgaaggacaagatcaaggagaaccaagaaaagattgccaacaaccgacaacttccgtatctcgtaggaaatgtcgttgaacttttggaccttgacccgaccgccgagtcctccgaagagggcgccaacatcgacttggatgccacgcgcgtgggtaaatcggcagtcatcaagacatcgaccagacagaccatctttctccctctcatcggcttggtcgaccccgagaagttgaagcccggcgatctcatcggtgttaacaaggattcgtaccttattctggatacgttgcccgccgagtacgacagcagagtcaaggctatggaggtcgacgagaagcctcaggagaagtacacagatgtcggtggtctcgacaaacagattgacgaacttgtcgaggctattgtgtggcctatgaaggaagccgaacggtttaagaagatcggtatcaaggcgcccaagggagctttgatgtacggacctcccggaacaggcaagactttacttgccagagcttgcgccgctcagacagatgccacattcctcaagcttgctggcccccagctagtgcagatgtttatcggagacggtgccaagctcgtaagggactgcttcgccctagcaaaagagaaggccccgtcaattatcttcatcgacgagttggatgccgtcggtaccaagcgtttcgacagcgagaagtccggcgatcgtgaagtccagcgaaccatgttggagctcctcaaccagctcgacggtttcgcttctgacgaccgtatcaaggttctcgccgcgacgaaccgtatcgacgtcctcgaccccgctttgcttcgttccggtcgtcttgaccgcaagatcgagttccctcttccgaacgaggaggcacgcgcacagattctcaagattcattccaggaagatgaaggtcaaccccggcgttaactggggcgagttggcgcgcagcacggatgagtttggcggtgccatgctgaaggctgtgtgtgtcgaggctggcatgattgccctccgtatgggcaagaatcagattggacacgaacactacgttgacgctatttctgaggtgcaggccaagaagaaggaaaccgtcaacttctacgcttaa

SEQ ID NO: 5679 - protein, 460 aa, Neurospora crassa OR74A
MSTLEELDDLDRREREDKKKDQDKDKNNKKEGDGDAEMKDAEPEADDILDEEILSLSTEDILMRKRLLENDARIMKSEYQRLSHERATMKDKIKENQEKIANNRQLPYLVGNVVELLDLDPTAESSEEGANIDLDATRVGKSAVIKTSTRQTIFLPLIGLVDPEKLKPGDLIGVNKDSYLILDTLPAEYDSRVKAMEVDEKPQEKYTDVGGLDKQIDELVEAIVWPMKEAERFKKIGIKAPKGALMYGPPGTGKTLLARACAAQTDATFLKLAGPQLVQMFIGDGAKLVRDCFALAKEKAPSIIFIDELDAVGTKRFDSEKSGDREVQRTMLELLNQLDGFASDDRIKVLAATNRIDVLDPALLRSGRLDRKIEFPLPNEEARAQILKIHSRKMKVNPGVNWGELARSTDEFGGAMLKAVCVEAGMIALRMGKNQIGHEHYVDAISEVQAKKKETVNFYA

SEQ ID NO: 5680 - DNA, 1266 bp, Neurospora crassa OR74A
  CDS (1)..(1266)
atgggcgacgtccttgtcgagaccccggccagtgtgacccagcctcaaaagaagtccgccccttcggcgatccccaacatcgagaccttcgagggcgtgtcaacagagggcggcgatgactacattaccttgaagaagcttcagaggcagctagaatacatcaagctgcaggaggaatacatcaaggatgagcagaggagcttgaagcgtgagcttgtacgtgcccaggaggaaatcaagaggattcaaagtgtccccttggtgattggacagttcatggaagctatcgatcaaaacacgggtatcgttcaatccagtactggctcaaactacgtcgtccgtatcctttcgactctcgatcgcgagctcctcaagccctcatcctccgtagcgctccaccgtcactctaatgccgtcgtcgatattttgccgcccgaggctgactcctcgattgctatgctcggtgccgacgagaagcccgacgttacatatgccgatgttggagggttggatatgcagaagcaggaaattcgggaagccgttgagctgcccctaacacactttgatctttacaagcagatcggcattgaccccccgcgcggtgtccttctctacggtcctcccggtaccggcaagacaatgttggtcaaggcggtcgcaaactcgacgacagcgaactttatccgcgtcgtcggttccgagttcgtacaaaagtatctcggtgagggtcctcgcatggtgcgcgacgtcttccgcatggctcgtgagaacgcgcccgccatcatcttcatcgacgaaattgatgccattgcgaccaagcgtttcgacgcgcagacgggtgccgatcgtgaggtgcaaagaattctgctcgaattgctcaaccagatggacggtttcgaccagaccgccaacgtcaaggtgatcatggccaccaaccgtgccgacaccctcgatcccgccctgctgcgtcccggtcgtcttgatcgcaagatcgagtttcccaacctgcgcgatcgccgcgagcgccgtctcatcttcaccacgattgctggcaagatgagcttggcccctgaggtcgaccttgacagcttgattgtccgcaacgatcctctcagcggtgccgtcatcgctgccattatgcaggaggccggtctgcgcgcagtacggaagaacaggtacaacatcatccaggctgatttggaggacgcctacagcagccaagtgaagggtacgagcgacgagaacaagtttgatttctacaagtaa

SEQ ID NO: 5681 - protein, 421 aa, Neurospora crassa OR74A
MGDVLVETPASVTQPQKKSAPSAIPNIETFEGVSTEGGDDYITLKKLQRQLEYIKLQEEYIKDEQRSLKRELVRAQEEIKRIQSVPLVIGQFMEAIDQNTGIVQSSTGSNYVVRILSTLDRELLKPSSSVALHRHSNAVVDILPPEADSSIAMLGADEKPDVTYADVGGLDMQKQEIREAVELPLTHFDLYKQIGIDPPRGVLLYGPPGTGKTMLVKAVANSTTANFIRVVGSEFVQKYLGEGPRMVRDVFRMARENAPAIIFIDEIDAIATKRFDAQTGADREVQRILLELLNQMDGFDQTANVKVIMATNRADTLDPALLRPGRLDRKIEFPNLRDRRERRLIFTTIAGKMSLAPEVDLDSLIVRNDPLSGAVIAAIMQEAGLRAVRKNRYNIIQADLEDAYSSQVKGTSDENKFDFYK

SEQ ID NO: 5682 - DNA, 1380 bp, Neurospora crassa OR74A
  CDS (1)..(1380)
atgggtcaaaatcagtctggcatgggcggaggccaggacccttcaaagtccaagaaagataagaaagataagcccaagtacgagccgccgccgaagcctaccacccgcatcggtcgcaagaagaagagacaaggcggtgccagcgctgccgccaagctcccctcagtgtatccgacaagccgatgcaaactccgactcctacgaatgcaacgaatccacgatcatctactgctcgaggaagaatatgtcgaaaatcaagaacgtctacgcaaggcgaagaccgccaaggacagcaatgctcctgcgtccgagctcgagtcttccgaccgtatggctgacgagcgctcccgtgtcgatgatatgcgtggcagccccatgggtgtcggtgttctcgaggagttgatcgacgacgaccacgccatcgtttccagcacatcggggcccgagtactacgttagcatcatgagctttgtcgacaaagaccttctggagcccggcgccagcgtcctgctacatcacaagagtgtcagcattgttggcgtgctcaccgacgacacggatccggccgtcagcgtcatgaagcttgacaaggcgcccacggagtcgtacgcggatattggtggcttggaacagcagatccaggaagttcgtgaatcagttgagcttccattgctgcatccggagctctacgaagaaatgggtatcaagccacccaagggtgtcattctttacggtgctcccggtaccggtaagaccctccttgccaaggctgtggcaaaccaaacttcggcaacgttcttgcgcatcgttggtagcgagcttatccaaaagtatcttggtgatggtcctcgactggtccgccagcttttccaggttgccgccgagaatgccccttccatcgtgttcatcgacgaaatcgatgccatcggtaccaagcgttacgactcgacatcgggcggcgaacgtgaaatccagagaaccatgttggagctgctgaaccagctggatggtttcgacgaccgtggagacgtcaaggtcatcatggccaccaacaagatcgagtcgcttgaccctgctttaatccgtcctggccgtatcgaccgcaagattctcttcgagaatcccgaccagaacaccaagcgcaagatcttcacgctccacaccagcaagatgtcacttaacgaggatgttgacctggaagagttcatcgcccagaaggacgatctctcaggtgccgacatcaaggccatctgctctgaggccggtctcatggccctccgtgagcgcagaatgcgggtgcagatggcagacttcagagctgctcgtgaaagagttctgcgcaccaagcaggaaggcgagcccgagggcttgtacttgtaa

SEQ ID NO: 5683 - protein, 459 aa, Neurospora crassa OR74A
MGQNQSGMGGGQDPSKSKKDKKDKPKYEPPPKPTTRIGRKKKRQGGASAAAKLPSVYPTSRCKLRLLRMQRIHDHLLLEEEYVENQERLRKAKTAKDSNAPASELESSDRMADERSRVDDMRGSPMGVGVLEELIDDDHAIVSSTSGPEYYVSIMSFVDKDLLEPGASVLLHHKSVSIVGVLTDDTDPAVSVMKLDKAPTESYADIGGLEQQIQEVRESVELPLLHPELYEEMGIKPPKGVILYGAPGTGKTLLAKAVANQTSATFLRIVGSELIQKYLGDGPRLVRQLFQVAAENAPSIVFIDEIDAIGTKRYDSTSGGEREIQRTMLELLNQLDGFDDRGDVKVIMATNKIESLDPALIRPGRIDRKILFENPDQNTKRKIFTLHTSKMSLNEDVDLEEFIAQKDDLSGADIKAICSEAGLMALRERRMRVQMADFRAARERVLRTKQEGEPEGLYL

SEQ ID NO: 5684 - DNA, 1170 bp, Neurospora crassa OR74A
  CDS (1)..(1170)
atggcgctcgacaactattatcacaacaagatcgaggccatgaagctcgagatcctcaagggccaagccgtcctccgccgtctcgaagcgcaacgaaatgactacaactcgcgtgtgcgcctgctcagggaagagctcggtctgctacaacagcccgggtcctatgtgggtgaggtcgtcaaggttatgagcacaaagaaggtcctcgtcaaggtacaccctgagggcaaatatgttgtcgatgtatccgacaatgtcgacatcaccaagctcaccgtcggcaagcgcgtcacccttctctcagactcgtacaagctcgaaaagatgcttccctcctcagtagacccgctcgtgtccctcatgatggtcgaaaaggtgcccgacagtacttacgatatgattggtggtttggaccagcaaatcaaggagatcaaggaggtgatcgagctcggcctcaagcaccccgagctgttcgagtcgctaggtatcgcccaaccaaagggtgtcctgctctacggccctcccggtaccggcaagaccctgctcgcccgtgccgttgcccaccacaccgactgcaagttcatccgtgtctcgggttccgagctcgtgcaaaagtacatcggcgagggttcccgcatggtacgcgagctgttcgtcatggcgcgcgagcacgcgccctccatcatctttatggacgagatcgactccatcggctcttcgcgtgtcgagggttcgtctggcggcgactccgaagtccagcgcaccatgctcgagctcctcaaccagcttgacggtttcgagcccaccaagaacatcaaggttatcatggccaccaaccgtctcgacattctcgaccccgccctcttgcgccctggccgcatcgaccgcaagatcgagttccctccgccgagcgtcgaggcccgtgccgacattctgcgcattcacagccgcaagatgaacctgacgcgcggcatcaacctgaccaagatcgccgagaagatgaacgggtgctcgggcgccgaactcaagggtgtctgtaccgaggccggcatgtacgccctccgcgagaggcgcgtgcatgtcacacaggaggactttgaactggccacggccaagattctgaataagcatgatgataaggaggtgtcgttggccaaattgtggcgttaa

SEQ ID NO: 5685 - protein, 389 aa, Neurospora crassa OR74A
MALDNYYHNKIEAMKLEILKGQAVLRRLEAQRNDYNSRVRLLREELGLLQQPGSYVGEVVKVMSTKKVLVKVHPEGKYVVDVSDNVDITKLTVGKRVTLLSDSYKLEKMLPSSVDPLVSLMMVEKVPDSTYDMIGGLDQQIKEIKEVIELGLKHPELFESLGIAQPKGVLLYGPPGTGKTLLARAVAHHTDCKFIRVSGSELVQKYIGEGSRMVRELFVMAREHAPSIIFMDEIDSIGSSRVEGSSGGDSEVQRTMLELLNQLDGFEPTKNIKVIMATNRLDILDPALLRPGRIDRKIEFPPPSVEARADILRIHSRKMNLTRGINLTKIAEKMNGCSGAELKGVCTEAGMYALRERRVHVTQEDFELATAKILNKHDDKEVSLAKLWR

SEQ ID NO: 5686 - DNA, 1230 bp, Tribolium castaneum
  CDS (1)..(1230)
atggaagtgatggatgttgtagtgcccgaaaaggatgagggaagccctgctgaaatcaagcccaacctccaggactgcgacatggaagacctgtacaccaaatacaagaaactgcaacaaatgctcgaatttctcgaagtccaagaagagtacatcaaagacgagcaacgcaacttgaagaaggagtatctccacgcccaggaggaggtgaagcggatccagtcggtgccgcttgtcatcggccagtttctggaagccgttgaccaaaatactgggattgtggggtcaaccaccgggtcgaattattacgtccggattttgtcaacgattgaccgggaattgctcaaaccttcggccagtgtggctttgcataagcacagtaacgcccttgtggacgtcctcccgcctgaagctgattcctcgatcagcatgctccaggctgatgagaagcctgacgtccagtatagcgatattggaggcatggatatgcaaaaacaggaaattcgcgaagctgtggagttgcccctcacccacttcgagctgtacaagcaaattgggattgacccccctcgtggggtcttaatgtacgggcctccaggctgtggcaagacaatgctggccaaggcagtggctcaccacaccactgctgcgttcatcagagttgtggggtcggagttcgtccagaagtacctaggggaggggcctaggatggttcgggacgtgttccgactggctaaggagaattcaccagctattatcttcattgacgagattgatgccattgctactaagcggtttgatgcccagacgggggccgacagagaagtacaaaggattctcttggagttgctcaaccaaatggatggttttgatcaaaccaccaatgttaaagttattatggctacaaatagggctgataccctcgacccggccctgcttcggccgggccgtttggacaggaaaatcgagtttccattgcccgacaggaggcaaaaaagattgatctttagcaccattacgtcaaaaatgaacttatcggaagaggtggacttggaggatttcgttgcccgacctgaccgtatttcaggtgctgatattaatgccatttgtcaagaggcaggaatgcatgccgtgagggaaaatcggtatattgtgctgccgaaagatttcgaaaaaggctacaaaaataatattaagaaggatgaaagcgagcacgaattttataaataa

SEQ ID NO: 5687 - protein, 409 aa, Tribolium castaneum
MEVMDVVVPEKDEGSPAEIKPNLQDCDMEDLYTKYKKLQQMLEFLEVQEEYIKDEQRNLKKEYLHAQEEVKRIQSVPLVIGQFLEAVDQNTGIVGSTTGSNYYVRILSTIDRELLKPSASVALHKHSNALVDVLPPEADSSISMLQADEKPDVQYSDIGGMDMQKQEIREAVELPLTHFELYKQIGIDPPRGVLMYGPPGCGKTMLAKAVAHHTTAAFIRVVGSEFVQKYLGEGPRMVRDVFRLAKENSPAIIFIDEIDAIATKRFDAQTGADREVQRILLELLNQMDGFDQTTNVKVIMATNRADTLDPALLRPGRLDRKIEFPLPDRRQKRLIFSTITSKMNLSEEVDLEDFVARPDRISGADINAICQEAGMHAVRENRYIVLPKDFEKGYKNNIKKDESEHEFYK

SEQ ID NO: 5688 - DNA, 1317 bp, Tribolium castaneum
  CDS (1)..(1317)
atgggtcaaagtcagtcaggccccggcggcggcgacaagaaggaagaaaaagacaagaagaagaaatacgagcccccgattccgacccgtgttggtaagaaaaagcgtcgtactaagggccccgacactgctttaaaactcccggtggtgaccccccacaccagatgccgcctaaaactcctcaaactcgaacgcatcaaagattacctcttgatggaggaggagttcatccggaaccaggagcgcctcaaacctcaagaagagaaaaacgaggaggagcgctcgaaggttgacgatttgagggggacccccatgtccgtggggaacctggaggagattatcgatgacaaccatgccattgtctcgacttcggtcggtagcgaacactacgtcagtattctgtcgtttgtggacaaggaccagctggagcctggctgttctgtgcttttgaaccacaaagtccatgcggttgtgggggttctgggcgatgatacggaccccatggtcacggttatgaaactggagaaagccccccaggaaacgtatgctgatatcggggggctcgacacccaaatccaggaaataaaggaatcggtcgagttaccgttgacccatccagaatactacgaggagatggggatcaagccaccgaaaggtgtgattttgtatgggcccccaggcacggggaaaacgctcctggccaaagctgtggccaatcaaacctctgctacttttttgagggttgtggggtcggaacttattcagaaatatctgggggatggcccgaaattagtaagagagctgttccgagttgctgaggaacacgcaccttccattgtttttattgatgagattgatgctgtggggacgaaacgttacgattcgaattcgggcggcgagcgcgaaattcagcgcactatgctagagttacttaaccaattggatgggtttgattcaaggggcgatgttaaagttattatggcaactaatcgaatcgaaactcttgatcctgctttgattcgtccgggacgtattgatcgcaaaatcgagtttccgttgcctgatgaaaaaacaaagaaacggatttttaacattcatacgtcacgaatgactttggcggaagatgtcaatttgcaggagttgattatggcaaaggatgatttatcaggcgctgatattaaggcgatttgtacggaggccgggctaatggccctgcgtgagcgaagaatgaaggtgatgaatgaagatttcaaaaaatcgaaagagagcgttctttataggaagaaagaagggactccggaaggactctacctttaa

SEQ ID NO: 5689 - protein, 438 aa, Tribolium castaneum
MGQSQSGPGGGDKKEEKDKKKKYEPPIPTRVGKKKRRTKGPDTALKLPVVTPHTRCRLKLLKLERIKDYLLMEEEFIRNQERLKPQEEKNEEERSKVDDLRGTPMSVGNLEEIIDDNHAIVSTSVGSEHYVSILSFVDKDQLEPGCSVLLNHKVHAVVGVLGDDTDPMVTVMKLEKAPQETYADIGGLDTQIQEIKESVELPLTHPEYYEEMGIKPPKGVILYGPPGTGKTLLAKAVANQTSATFLRVVGSELIQKYLGDGPKLVRELFRVAEEHAPSIVFIDEIDAVGTKRYDSNSGGEREIQRTMLELLNQLDGFDSRGDVKVIMATNRIETLDPALIRPGRIDRKIEFPLPDEKTKKRIFNIHTSRMTLAEDVNLQELIMAKDDLSGADIKAICTEAGLMALRERRMKVMNEDFKKSKESVLYRKKEGTPEGLYL

SEQ ID NO: 5690 - DNA, 1218 bp, Hyperthermus butylicus DSM 5456
  CDS (1)..(1218): transl_table=11
atgcagtacagcgacgccaatgaccatgaggcttacctccggaagtatattcaacagcttgagcgcagggttcgcgagttagaagctgaacgctcagagctgcgccgtgagctacgccgctaccgcatagaggttgacaagctgctaagcccaccgctcatcgaggctgttgtactcagtgtgctccccgatggcagggtcgtggtgaagagtagtactggaccaaacctagtggtaaacgtctcatcaaatgttgacgtgtcaaaactagtgcctggagcctatgtagcgttaaaccagcgtggatctacaatagttgaggttctaccggagcgcgaggacccctacgtaaaggctatggaggttgttgacagacccaaggtcacgttcgacgatattggtgggctagaggagcaaaagagggagctatacgaggctataattctaccgctaaagaagcctgagctattccgtgaactaggcatagagcctccaaagggcgtactgctctacgggcctcccggatgtggcaaaacactactcgctaaggctgttgcaagcatgaccaatgcaaccttcatacgtgttgtagcatcagagtttgtccacaagtacgtcggtgagggcgcaaggattgtaagggaggtcttcaagcttgcgaggcgcaaggcgccatcaataatattcatagacgaaatagacgccattgcagccaagaggattgatctagggacgagtggtgagagggagatacagagaacgctaatgcaactcctagcagagctagacggtttcgaccccctaggcgacgtaaaggtcatcgcagccaccaaccgtatcgacatacttgacccggcactgctaaggccgggcaggtttgacaggttaatctacgtgccgccacctgatgagaaggggcggctcgagatattcagaatacatacccgccgcatgaagctcggcgaggacgtagaccttgcctacctcgcaaagatcactgaaggtgctaccggcgccgatataagggctatagtgatggaggctggctacaacgctctacgtgccggcaggagggtagtaatgatggaagacttcctagcagctgttgagaaggttatgaagaagcgccgcagaccgtacgccacgatgccagaatatcttgacgaggctccaacgcgtgccacaacgtctagcgaggctgctgtgatgcatatctag

SEQ ID NO: 5691 - protein, 405 aa, Hyperthermus butylicus DSM 5456
MQYSDANDHEAYLRKYIQQLERRVRELEAERSELRRELRRYRIEVDKLLSPPLIEAVVLSVLPDGRVVVKSSTGPNLVVNVSSNVDVSKLVPGAYVALNQRGSTIVEVLPEREDPYVKAMEVVDRPKVTFDDIGGLEEQKRELYEAIILPLKKPELFRELGIEPPKGVLLYGPPGCGKTLLAKAVASMTNATFIRVVASEFVHKYVGEGARIVREVFKLARRKAPSIIFIDEIDAIAAKRIDLGTSGEREIQRTLMQLLAELDGFDPLGDVKVIAATNRIDILDPALLRPGRFDRLIYVPPPDEKGRLEIFRIHTRRMKLGEDVDLAYLAKITEGATGADIRAIVMEAGYNALRAGRRVVMMEDFLAAVEKVMKKRRRPYATMPEYLDEAPTRATTSSEAAVMHI

SEQ ID NO: 5692 - DNA, 1269 bp, Methanocorpusculum labreanum Z
  CDS (1)..(1269): transl_table=11
atgactgaatctgggcaggatgacaatcaggatgtgatcacgccgatcatctccgtcgaaccggttatgtcgtcggatgagcttgcacagctcagaaaaaccaacattgccctggaaagccgcaactatgagctgcgggaaacggtcagacagctcaggctgcaggcggcggcaacggaatctgaaagggatcagtataaacgcgaggcgaaacggctgaaaggcgatctggaacagtaccgcaccccgccgctcgtgatcgggacgatcgaagccctcgcgtcggatgaacgagttattgtaaggagcacgaccgggccgcagttcctctcgaaggtaagcgagacggtcgacccaaaagagataatccccgggagacagtgtgccctgcatccgcagtccttcgtccttatcgaggtcctgccgaacaaatacgatactctcatctccggcatggaggtcgaaacggcgccgaacgtcagctacgcagatatcggcggactcgaactccagaagaccctcttacgcgaagcagcggaactgccgctcctgaaacccgatctgttcgcaaaagtgggtatcgagccgccgaaaggcgtgcttctcgtcgggccgccgggaaccggcaagaccctgcttgcaaaagcggtatcccacgagacgaacgccgccttcatccgtgtcgtcggctccgaactcgtgcagaagtatatcggcgaaggggcacggctcgttcgggaactgttcgctctcgcacgagacaaggctcccgcgatcatttttatcgacgagatcgacgcgatcggatcgtcacgaagcaacgatgcctactcggcaggcgatcacgaagtgaaccggaccctgatgcagcttttgtccgaactggacggattcaatacgcgggggaacgtgaagatcatcgcggccacgaaccggatggatatcctcgatcaggcgctcttacgccccggacggttcgaccggatcatcgagttccctctccctgatgaagcgggacgggcaatgatcctggcgatccacacgaagaatatgcatcttgcaaagagcgtctcgcttgaaaagatcgcggccgagaccccgaacatgaacggatcggagcttatggcgatctgcgtggaagccggcatgaatgccgttcgaaacggcaggacgagggtcagcggcgaagatttcgccaaagcgatcgaggcggtcagaaagggacgaactgagaagatcatgcccctccctgacgggatgtattcataa

SEQ ID NO: 5693 - protein, 422 aa, Methanocorpusculum labreanum Z
MTESGQDDNQDVITPIISVEPVMSSDELAQLRKTNIALESRNYELRETVRQLRLQAAATESERDQYKREAKRLKGDLEQYRTPPLVIGTIEALASDERVIVRSTTGPQFLSKVSETVDPKEIIPGRQCALHPQSFVLIEVLPNKYDTLISGMEVETAPNVSYADIGGLELQKTLLREAAELPLLKPDLFAKVGIEPPKGVLLVGPPGTGKTLLAKAVSHETNAAFIRVVGSELVQKYIGEGARLVRELFALARDKAPAIIFIDEIDAIGSSRSNDAYSAGDHEVNRTLMQLLSELDGFNTRGNVKIIAATNRMDILDQALLRPGRFDRIIEFPLPDEAGRAMILAIHTKNMHLAKSVSLEKIAAETPNMNGSELMAICVEAGMNAVRNGRTRVSGEDFAKAIEAVRKGRTEKIMPLPDGMYS

SEQ ID NO: 5694 - DNA, 1209 bp, Staphylothermus marinus F1
  CDS (1)..(1209): transl_table=11
atgagtagtgatgctaaaaaagtttttgaagcagaaattgatgaggaagaatatgtaagactgcttgaatcgaaaattaggttcttagagagtgaacgcgataaattaatgatgaagattagattctataaatcagaaatagagaagctattgtctccgccactaatagaagcagttgttgtaaatgttctaaaggatggaagagttgttgttaaaagcagtactggcccgagcttagtggttaaggttttaaacagtatacctttagaaaagcttagaccaggacaacatgttgctttaaacaatagaggctcaactattgttgatatattgcctgaatacgaggatccttatgttaaatccatggagataattgaaagaccaaatgtgacattcaaggatattggtggattaaaagagcagataagagaattgcgtgaagtggttgagctaccacttaagaatccagagcttttcgaagaaataggaattgagcctcctaaaggcgtactattatatggtcctcctggttgtggtaaaactctactcgcgaaagcagtagctcatgaatccggtgcaacatttatcagtattgtaggcagcgaacttgttcaaaaatttataggtgaaggagcacgtattgtacgtgaagttttccagtatgctcgtaaaaaagctcctgcaatagtgtttattgatgaaatagatgctatagctgctcgtagattagatataggaacaagtggtgagagagaggttcagagaacacttatgcagttactagccgagattgacggttttaaaccactcgataaagtcaagatcatagcggcaactaatcgtatagatattttagacccagctattttgaggccgggaagatttgatagattaatagaagttccgttaccagacctaaacggaagatatgaaatattcaaagtccatacaagaaaaatgaagctaggcagagatgttgacctatacgagttagcgaggctaactgagggtgcaactggtgcagagataaaatcaattgttacagaagccggatataacgcgattagaaacaataggaaatatgttataagggaagacttcatttattcaatcaagaaagttatgagcaagaagaaaataagagataagaatacggagtacttgatggatcgtttagagaaagattattctagatacatgcttcaataa

SEQ ID NO: 5695 - protein, 402 aa, Staphylothermus marinus F1
MSSDAKKVFEAEIDEEEYVRLLESKIRFLESERDKLMMKIRFYKSEIEKLLSPPLIEAVVVNVLKDGRVVVKSSTGPSLVVKVLNSIPLEKLRPGQHVALNNRGSTIVDILPEYEDPYVKSMEIIERPNVTFKDIGGLKEQIRELREVVELPLKNPELFEEIGIEPPKGVLLYGPPGCGKTLLAKAVAHESGATFISIVGSELVQKFIGEGARIVREVFQYARKKAPAIVFIDEIDAIAARRLDIGTSGEREVQRTLMQLLAEIDGFKPLDKVKIIAATNRIDILDPAILRPGRFDRLIEVPLPDLNGRYEIFKVHTRKMKLGRDVDLYELARLTEGATGAEIKSIVTEAGYNAIRNNRKYVIREDFIYSIKKVMSKKKIRDKNTEYLMDRLEKDYSRYMLQ

SEQ ID NO: 5696 - DNA, 1239 bp, Methanoculleus marisnigri JR1
  CDS (1)..(1239): transl_table=11
atgggagatatcgctcggcaggcaccagacaaggataccggtgaagacatctaccagtacctcctggaacggattacgaacctcgaaaaccgaaacctggagctacgcgagcagttccgccagatggagtccgagaaacgatacgttgagacccagaagatccgctacgaacgggaactccgaaaactcaagagcgagatcgaacagctgagaagccctcctctcgtgatcggaaccgttaccgacgttatcgacaacagccgggtgatcgtgcgaagcagtgcaggaccgcgattcctggtccgtacgtcccagcttatcgaccccgatctcctcaaaccgggtgtgcggtgtacgctcaaccagcagtccctcgcgatcgtggatgtgctccccacgagctacgacgcgcagatctacggtatggagctggtggagtccccggaggagacctacgagaacatcggcggccttgaaccgcagatcgaggagatccgggaagccgtcgagctccccctgacaaaaccgcagctcttcgagaaggtcggcatctccccgccgaagggcgttctcctctacggcccgcccggcacggggaagaccctcctcgcgcgggcggtggcccaccagacgaacgcgcatttcctccgcgtggtcggttcggagctggtgcagaagtacatcggcgagggcgcccgcctggtccgggagctcttcgacctcgcgaagcagagggcgccgtcgatcatcttcatcgacgagatcgacgcaatcggcgcgcaccggaacgactcgaccacctccggcgaccgcgaggtccagcggacgctgatgcagctcctggcggagatggacgggttcgacaaccgcggggacgtcaagatcgtcgcggcgaccaaccggatcgatatcctcgatcgtgccctcctccgcccgggccggttcgatcggatgattgagatcccgctccccgaccaccaggggaggcttgcgatcttaaagatccacacccagtacatgaacatcggcgaagacgtcaacctctcggaggtctcgcggctcacggaaggcaagaacggtgccgacctccgggcgatatgcatggaggcggggatgttcgccatcaggatggagcgcgatgcggtcaacagcgaagatttcatgaaggcgatcgacaaactcgcgcttgacttcgatcgccaccacttccacaccaccttcggcgagatgttcgcctga

SEQ ID NO: 5697 - protein, 412 aa, Methanoculleus marisnigri JR1
MGDIARQAPDKDTGEDIYQYLLERITNLENRNLELREQFRQMESEKRYVETQKIRYERELRKLKSEIEQLRSPPLVIGTVTDVIDNSRVIVRSSAGPRFLVRTSQLIDPDLLKPGVRCTLNQQSLAIVDVLPTSYDAQIYGMELVESPEETYENIGGLEPQIEEIREAVELPLTKPQLFEKVGISPPKGVLLYGPPGTGKTLLARAVAHQTNAHFLRVVGSELVQKYIGEGARLVRELFDLAKQRAPSIIFIDEIDAIGAHRNDSTTSGDREVQRTLMQLLAEMDGFDNRGDVKIVAATNRIDILDRALLRPGRFDRMIEIPLPDHQGRLAILKIHTQYMNIGEDVNLSEVSRLTEGKNGADLRAICMEAGMFAIRMERDAVNSEDFMKAIDKLALDFDRHHFHTTFGEMFA

SEQ ID NO: 5698 - DNA, 1224 bp, Methanococcus maripaludis C5
  CDS (1)..(1224): transl_table=11
atgagttacccagatgattattccacagatatagaaaaaaataaaatggatttaaaagaatttaaagaaaaaactcagattgcagagttagaaagcaaagttttgagattggaattaaaaaataaagatattagtagagagaatgtacaaattaaaaaagaaaatgaaatattaaagcgagaacttgataaattaagaattcctcccttaatacttggtacaatactcgatagagtaaatgaaagaaaagcagttgttaaaagttctacggggccaaatttccttgtaaatctttcacaatttgtagatcctgacgatatcgttccaggagcaagagtttgtttaaatcagcagactttagcaattgtagaagtacttcctaaagaaaaagactaccgagctatggcaatggaaattgaggaaaaaccagacatttcctttgaagatatcggtggtttgaacaaccagataagagatattaaagaagtagtagaactcccacttaaaaaccctgaattattcgaaaaagtgggtatcgttccaccaaaaggagtattgctttacggcccaccaggaactggaaaaacacttcttgcaaaagctgttgcatacgaaaccaacgcatcattcgttagggttgttggttcagaactcgtcaaaaaattcatcggtgaaggtgcaaaacttgtaagggatgtgttcaaacttgcaaaagagaaatcaccttgcattatatttattgatgaaatcgatgcagttgcaagcaaaagaactgaatcgctaactggtggagacagagaagttcaaagaactttaatgcagcttcttgcagaaatggatggttttgattcaagaggagatgtaaaaatcatcgctgcaacgaacaggccagacattttagatcctgcaatactcagacctggaagatttgatagaatcattgaaatttcaatgcctgatgaagatggaagactcgacatcttgaaaatccacactgaaaaaatgaaccttaaaggtgtggatttaagagaagttgcaaaaattgcagaaaatatggtcggtgctgacttaaaagcggtatgtactgaagcaggtatgtttgcaataagagaagaaagagaattcatcaaaatggatgactttagagaagctatcacaaaaattaccggtaaaaaagaaaaatgcagttacgacatgccacaattaaccgtaatgtacggataa

SEQ ID NO: 5699 - protein, 407 aa, Methanococcus maripaludis C5
MSYPDDYSTDIEKNKMDLKEFKEKTQIAELESKVLRLELKNKDISRENVQIKKENEILKRELDKLRIPPLILGTILDRVNERKAVVKSSTGPNFLVNLSQFVDPDDIVPGARVCLNQQTLAIVEVLPKEKDYRAMAMEIEEKPDISFEDIGGLNNQIRDIKEVVELPLKNPELFEKVGIVPPKGVLLYGPPGTGKTLLAKAVAYETNASFVRVVGSELVKKFIGEGAKLVRDVFKLAKEKSPCIIFIDEIDAVASKRTESLTGGDREVQRTLMQLLAEMDGFDSRGDVKIIAATNRPDILDPAILRPGRFDRIIEISMPDEDGRLDILKIHTEKMNLKGVDLREVAKIAENMVGADLKAVCTEAGMFAIREEREFIKMDDFREAITKITGKKEKCSYDMPQLTVMYG

SEQ ID NO: 5700 - DNA, 1263 bp, Methanobrevibacter smithii ATCC 35061
  CDS (1)..(1263): transl_table=11
atgagtcctatggataatattaatgatttggagaattcttcaaaagaacagttagttgagaaagttgaatcaatgcaagaagaaatagattcattaaaagaagaaaactccaaagctaaaagtaatttaatgtggaaagttaggaaattggaaaaagataaagttctaattgaaaatgaaaaaatcagattagaaagagaaactaaatccttacgttccgaagtagaaagatttagatcacctcctttagttttagctactattactgaagttttagatgattacagaatgactgttaaaagcagtactggacctagctttttagtaaattattcaaaattcttagatgaaaaattattggtgccaggttctagagttgcattgaaccaacagacttttggtattgtagaagttttaccgtcagaaaaagatgcaaatgttacaggaatggaaattgaaacaaaacctgacattacatatgataaaatcggtggacttgaagagcaaatagttgaagttaaagaaactgttgaacttcctttaaaagagccggaattatttgaaaaaataggtattgatccgcctaaaggaattttattgtacggacctccgggaaccggtaaaactttacttgcaaaagcggtagctaatgaaacaaatgctacatttattaaaattgtagcttccgaattcgttaaaaaatatataggtgaaggagccagacttgttcgtgaagtatttgaattagctaaagaaaaagcaccggctattattttcattgatgaacttgatgctgttgcagccaaaaggcttaaaagttcaactagtggagacagagaggttcaaagaactttaatgcaacttcttgctgaacttgacggttttgaatccagaggtgatattggaattatcggtgcaacaaaccgtccggatattttagaccctgcattattaaggcctggccgttttgacagattcatagaagttccccttcctaatgatgacggaagaaaacaaatcctaaaaatacatactaaaaacatggctttggatgaggaagccgacttggatttactcagcagcttaactgacggtctttccggtgctgatttaaaggcagtatgtactgaagcaggtatgtttgctattcgtgaaaaaagagatagagtcacagtaactgatttcatggatgctgtagaaaaagttcttgacaaggaacatgatgatgaatttataaaagaagcaggcgtaatgtttgcttaa

SEQ ID NO: 5701 - protein, 420 aa, Methanobrevibacter smithii ATCC 35061
MSPMDNINDLENSSKEQLVEKVESMQEEIDSLKEENSKAKSNLMWKVRKLEKDKVLIENEKIRLERETKSLRSEVERFRSPPLVLATITEVLDDYRMTVKSSTGPSFLVNYSKFLDEKLLVPGSRVALNQQTFGIVEVLPSEKDANVTGMEIETKPDITYDKIGGLEEQIVEVKETVELPLKEPELFEKIGIDPPKGILLYGPPGTGKTLLAKAVANETNATFIKIVASEFVKKYIGEGARLVREVFELAKEKAPAIIFIDELDAVAAKRLKSSTSGDREVQRTLMQLLAELDGFESRGDIGIIGATNRPDILDPALLRPGRFDRFIEVPLPNDDGRKQILKIHTKNMALDEEADLDLLSSLTDGLSGADLKAVCTEAGMFAIREKRDRVTVTDFMDAVEKVLDKEHDDEFIKEAGVMFA

SEQ ID NO: 5702 - DNA, 1224 bp, Methanococcus vannielii SB
  CDS (1)..(1224): transl_table=11
atgacttacccagacgattattctactgacgttcaaaaaaatgaaatggatttaaaagaatttaaagaaaaagcataccttgcagagcttgaaagtaaagttttaaggttagaattaaaaaataaagacattactagagagaatgttcaaattaaaaaagaaaatgaaatattaaagcgagaacttgataaattaagaattccgccattgatacttggaacagttcttgatagagttaatgaaagaaaagcagttgtaaaaagttctacaggcccaaatttccttgtaaacctttcacaatttgttgagccagatgacatagttccgggtgcacgggtttgtttaaaccagcaaactctcgcagttgttgaagtacttccaaaagaaaaagactatcgtgcaatggcaatggaactcgaagaaaagccagatatattatttggagatatcggtggattgaataatcaaataagggatattaaagaagtagttgagcttccacttaaaaatccagaactttttgaaaaagtaggaattgttcctccaaaaggggtgcttctttatgggccacccggaactggaaaaacactgcttgcaaaagctgttgctcgtgaaaccaatgcttcatttgtaagggtagttggttcagaacttgttaaaaagttcattggagaaggggcaaaacttgtaagggacgtattcaaacttgcaaaagaaaagtcaccttgtatcatctttattgatgaaatcgatgcagttgcaagtaaaagaacggaatctttaacaggcggagatagggaagttcaaagaaccttgatgcagcttcttgctgaaatggatggctttgattcaagaggcgatgtaaaaataattgctgcaacgaataggcctgatattttagaccctgcaatccttagacctgggagatttgatagaattatagaaatagctgctcctgatgaagatggaagacttgaaatattcaaaatacacaccgataaaatgaacattaaatccgttgacttaagagaaattgcaaaaatggctgaaaatatggtcggtgcagacattaaagcagtatgtactgaagcaggtatgtttgcgatacgggaaggaagggaatacgtaacaacaaaagactttaaagaagcgcttttaaaggttacaggtaaaaaagaaaaatccgaagaaggaattgcccacttaaccacgatgtatggttaa

SEQ ID NO: 5703 - protein, 407 aa, Methanococcus vannielii SB
MTYPDDYSTDVQKNEMDLKEFKEKAYLAELESKVLRLELKNKDITRENVQIKKENEILKRELDKLRIPPLILGTVLDRVNERKAVVKSSTGPNFLVNLSQFVEPDDIVPGARVCLNQQTLAVVEVLPKEKDYRAMAMELEEKPDILFGDIGGLNNQIRDIKEVVELPLKNPELFEKVGIVPPKGVLLYGPPGTGKTLLAKAVARETNASFVRVVGSELVKKFIGEGAKLVRDVFKLAKEKSPCIIFIDEIDAVASKRTESLTGGDREVQRTLMQLLAEMDGFDSRGDVKIIAATNRPDILDPAILRPGRFDRIIEIAAPDEDGRLEIFKIHTDKMNIKSVDLREIAKMAENMVGADIKAVCTEAGMFAIREGREYVTTKDFKEALLKVTGKKEKSEEGIAHLTTMYG

SEQ ID NO: 5704 - DNA, 1227 bp, Methanococcus aeolicus Nankai-3
  CDS (1)..(1227): transl_table=11
atgacaactccaacttatgatgaggatataggaaataaaaacatagacacggacatagctgaatttaaagaaaaggcaaaaattgcagaacttgaaagtacaatattaagaatggatttagaaaaaaggggattattaaaagctaatgaagaattaaataaggaagtagaagtccttagaagagaattagaaaaattaagagttcctccgcttattattgggactgtcacagataaagttggaaaagaaaaggcagtagttaaaagctccacaggtccaagttttttggttagtatttctaaattcatagatagcaatgaaatcgtacctggtacaagaatatgtttaaaccagcaaactctatctgttgtagaaatattgccaaatgaaaaagattacagggctttggcaatggaaatcgaggaaaaaccagatattacatttgataagataggagggctggacaaacaaataaaagaagttaaggaggtagtggagctcccattaacccatccagaattatttgaaaaagtaggtattgaaccacctaagggagtattgctttacgggccacctggaacaggtaaaacgctacttgcaaaagccgtagcaaatgaaaccaatgcatcatttataaaactcgttggttctgaattagttaaaaaatttataggggaaggggcaaaacttgtaaaagatgtatttaaattggcgagagaaaacgcacccacaataatatttattgatgaaattgatgccgtagcaagtaaaagaacagaatcactcacagggggagatagggaagttcaaagaacactcatgcaacttcttgcagagatggacggctttgagtcaaaaggagatgtaaaaataataggggccacaaacagaccagacatacttgatacagcaatattgagacctggaagatttgacagaattattgaagttcctgcacccacagcagacggaatagtagatatattaaaaatccatacaaaaaatatgaatttaaaaggcgtagatttagaaaaagttgcagaacatgccgaaggttgtgttggtgctgatttaaaggccgtatgtaccgaagctggtatgcttgcaataagagatagaagagaattcgttacaatggacgactttttaagtgccattgaaaagctaacaggggaaaaggaagaagaatatgcatttaaagaacatcctgctgtaatgtatggataa

SEQ ID NO: 5705 - protein, 408 aa, Methanococcus aeolicus Nankai-3
MTTPTYDEDIGNKNIDTDIAEFKEKAKIAELESTILRMDLEKRGLLKANEELNKEVEVLRRELEKLRVPPLIIGTVTDKVGKEKAVVKSSTGPSFLVSISKFIDSNEIVPGTRICLNQQTLSVVEILPNEKDYRALAMEIEEKPDITFDKIGGLDKQIKEVKEVVELPLTHPELFEKVGIEPPKGVLLYGPPGTGKTLLAKAVANETNASFIKLVGSELVKKFIGEGAKLVKDVFKLARENAPTIIFIDEIDAVASKRTESLTGGDREVQRTLMQLLAEMDGFESKGDVKIIGATNRPDILDTAILRPGRFDRIIEVPAPTADGIVDILKIHTKNMNLKGVDLEKVAEHAEGCVGADLKAVCTEAGMLAIRDRREFVTMDDFLSAIEKLTGEKEEEYAFKEHPAVMYG

SEQ ID NO: 5706 - DNA, 1224 bp, Methanococcus maripaludis C7
  CDS (1)..(1224): transl_table=11
atgagttacccagatgattattccacagatatagaaaaaaataaaatggatttaaaagaatttaaagagaaaactcagattgcagagttagaaagtaaagttttgagattggaattaaaaaataaagatgtaactagagagaacgtacaaattaaaaaagaaaatgaaatattaaagcgagaacttgataaattaagaattccgccattaatactcggcacaatactcgacaaagtaaacgaaagaaaagcagttgttaaaagttctacaggcccaaatttccttgtaaacctttcacaatttgtagatcctgaagacattgttccaggagcaagagtttgtttaaatcaacagacacttgcaattgtagaagtacttcctaaagaaaaagactaccgagctatggcaatggaaattgaagaaaaaccagacatttcctttgaagatatcggtggtttgaacaatcagattagggatattaaagaagtagtagaacttccacttaaaaacccagaactatttgaaaaagtgggtatcgttccaccaaaaggagtactgctctacggacctccgggaactggaaaaacacttcttgcaaaagctgttgcatacgaaaccaacgcatcatttgttagagttgttggttcagaactggtcaaaaaattcatcggtgaaggtgcaaaacttgtaagggatgttttcaaacttgcaaaagaaaaatcaccttgcatcatattcattgacgaaatcgatgcagttgcaagcaaaagaactgaatcattaaccggtggagatagagaagttcaaagaactttaatgcagcttcttgcagaaatggatggttttgattcaagaggcgatgtaaaaatcattgctgcaacgaacagaccggacattttagaccctgcaatattaagacccggaagatttgatagaatcattgaaatttcaatgcctgatgaagatggaaggcttgaaatcttgaaaatccatactgaaaagatgaacctcaaaaatgttgatttgagagaagttgcaaaacttgcagaaaacatggttggtgctgacttaaaggcagtatgtaccgaagcaggtatgtttgcgataagagaagaaagagaattcatcaaaatggacgacttcaaagaagctatctcaaaaattacaggtaaaaaagaaaaatgcagttacgatatgccacaattaaccgtaatgtacggataa

SEQ ID NO: 5707 - protein, 407 aa, Methanococcus maripaludis C7
MSYPDDYSTDIEKNKMDLKEFKEKTQIAELESKVLRLELKNKDVTRENVQIKKENEILKRELDKLRIPPLILGTILDKVNERKAVVKSSTGPNFLVNLSQFVDPEDIVPGARVCLNQQTLAIVEVLPKEKDYRAMAMEIEEKPDISFEDIGGLNNQIRDIKEVVELPLKNPELFEKVGIVPPKGVLLYGPPGTGKTLLAKAVAYETNASFVRVVGSELVKKFIGEGAKLVRDVFKLAKEKSPCIIFIDEIDAVASKRTESLTGGDREVQRTLMQLLAEMDGFDSRGDVKIIAATNRPDILDPAILRPGRFDRIIEISMPDEDGRLEILKIHTEKMNLKNVDLREVAKLAENMVGADLKAVCTEAGMFAIREEREFIKMDDFKEAISKITGKKEKCSYDMPQLTVMYG

SEQ ID NO: 5708 - DNA, 1311 bp, Candidatus Methanoregula boonei 6A8
  CDS (1)..(1311): transl_table=11
gtgggcgatattctccgcgatacagccgatccacagactcccgaggaactgtgccggctgtaccgctccctgaccgagcagctgcgtgaccagctccagcggatcgagaccgataagcaggatcttgagtcccagatgctggaacggatttcgagtcttgaatcacgcaacctggagctccgggagcagatccgacaggcagaggcggacaagcgctatatcgaaacccagaagatcaggtacgagcgggaggtaagaaagctcaagagcgagagcgagcagctgcggagccccccgcttattatcggaaccgttgtagacgtggtggatgccaacagggtcattgtacgcagcagcgccggcccccggttcctggtgaggagttcaccatccgttaatcccgacgatattaaaccgggtgcacgctgcacgctcaaccagcagtcacttgcgatcgtcgaattgctgcccagttctttcgatgcccaggtgtacgggatggaactggtggattccccgcaggagtgctatacggatatcggggggttaaaggagcagataaacgaggtaagggaggcagtggagctcccgctcaaacggcctgagctctttacccaaattgggatcgaacctcccaagggtgttctcctttacgggccgccgggcacgggaaagacccttcttgcaaaggcggttgcccatgagaccaatgcccatttcatgcgggtggtgggaagcgaactggtccagaaatatatcggtgagggagcacgccttgtccgcgagctctttgaccttgcaaagaaaaaagccccgaccatcattttcatcgatgagatcgatgcggtaggtgcatcaaggaccgaggcaaacacctcgggagatcgcgaagtgcagcggacgcttatgcagcttttggccggcatggatggctttgaaacccggggagatgtgaagattatcggggcaaccaaccggatcgacatcctggacaaggccctgctccggcccggccggttcgaccgtatcatcgagatcccgcttcccgatgaggaaggccgtctctccatcttaaaggtgcacacccggacactcaccatggaggaaacggtcaaccttcccgagatcgcgggactgacagagggtaaaaacggtgctgatctccgggcaatctgtatggaggcagggatgtacgcgattaggaatgagcgcccggccatcaccagggaggatttcctttcagcaatagagaaggtccggcttgacttttcccattctccgaccgattcagaagggcggatgtttgcctga

SEQ ID NO: 5709 - protein, 436 aa, Candidatus Methanoregula boonei 6A8
MGDILRDTADPQTPEELCRLYRSLTEQLRDQLQRIETDKQDLESQMLERISSLESRNLELREQIRQAEADKRYIETQKIRYEREVRKLKSESEQLRSPPLIIGTVVDVVDANRVIVRSSAGPRFLVRSSPSVNPDDIKPGARCTLNQQSLAIVELLPSSFDAQVYGMELVDSPQECYTDIGGLKEQINEVREAVELPLKRPELFTQIGIEPPKGVLLYGPPGTGKTLLAKAVAHETNAHFMRVVGSELVQKYIGEGARLVRELFDLAKKKAPTIIFIDEIDAVGASRTEANTSGDREVQRTLMQLLAGMDGFETRGDVKIIGATNRIDILDKALLRPGRFDRIIEIPLPDEEGRLSILKVHTRTLTMEETVNLPEIAGLTEGKNGADLRAICMEAGMYAIRNERPAITREDFLSAIEKVRLDFSHSPTDSEGRMFA

SEQ ID NO: 5710 - DNA, 1203 bp, Ignicoccus hospitalis KIN4/I
  CDS (1)..(1203): transl_table=11
atggtagcgtttgatattgatagaaaatttgggggagaggaaagcgacgacgtggaggacgtcgaactcctcaagagaaaaataaacaggctgactaaggaggtaaagagactcaagtccgagctggagtactggaagggggaggtcaacaagctgaccaacccgcccctcatagaggcgaccttgctcgacgtcttgcctgacgggagggcggtggtgaagtccagcgccggcccggtcctagtggtcgaggtaagctcccgcgtccccaaggaactgctcaagcccggcataagcgtggcggttaaccagaggggttcaactgtagtggacgtgttgaaaggtttggaggatccttacgtaaaagctatggaggttgtcgaacgccccaagacaaggtatagcgacgtaggagggttgaaacagcagttggaggaggttagagaggttgtggaacttcccttgaagaatcccgaaatgttcaaggagataggaattgagcccttgaaaggagtcctactctacggccctcccggctgcgggaagaccttgatcgcgagggcggtggcgggcgaggtaggggctaccttcataagggtcgtggggagcgagctagttaacaagttcataggcgagggggcgaggatagtcagagaggtctttaacatggctaggaagaaggcgcccagcataatattcatagacgagatagacgccatagccgccaagagaatagagatgggtacctccggcgagagggaggtgcagagaacgttgatgcagctcttggcggagctcgacggcttcgaccctctgagcggggtagcggtcatagccgccacgaacaggctggacatactcgaccccgcgatcttgaggccgggacggtttgacagaataatctacatcccgccgccggacaagaagggtaggctagagatattgcagatccacactagaaacatgaggatggcggacgacgtagacttggagaagatagcggagatgacggagggggctaccggagcggacttgaaggcgatagtgaccgaggccggctataatgccctcagaaacaagcgcaagtacgtaactatggaagacttcttagcggccgtcgataaggttatgagaaagagggccggcgcaagctaccgcctcagccccagagagggcgcgccgatacaaatacacaccatgtag

SEQ ID NO: 5711 - protein, 400 aa, Ignicoccus hospitalis KIN4/I
MVAFDIDRKFGGEESDDVEDVELLKRKINRLTKEVKRLKSELEYWKGEVNKLTNPPLIEATLLDVLPDGRAVVKSSAGPVLVVEVSSRVPKELLKPGISVAVNQRGSTVVDVLKGLEDPYVKAMEVVERPKTRYSDVGGLKQQLEEVREVVELPLKNPEMFKEIGIEPLKGVLLYGPPGCGKTLIARAVAGEVGATFIRVVGSELVNKFIGEGARIVREVFNMARKKAPSIIFIDEIDAIAAKRIEMGTSGEREVQRTLMQLLAELDGFDPLSGVAVIAATNRLDILDPAILRPGRFDRIIYIPPPDKKGRLEILQIHTRNMRMADDVDLEKIAEMTEGATGADLKAIVTEAGYNALRNKRKYVTMEDFLAAVDKVMRKRAGASYRLSPREGAPIQIHTM

SEQ ID NO: 5712 - DNA, 1224 bp, Methanococcus maripaludis C6
  CDS (1)..(1224): transl_table=11
atgagttacccagatgattattccacagacgtagaaaaaaataaaatggatttaaaagaatttaaagaaaaaactcagattgcagagttagaaagcaaagttttgagattggaattaaaaaataaagatattagtagagagaacgtacagattaaaaaagaaaatgaaatattaaagcgagaacttgataaattaagaattcctcccttaatacttggtacaatacttgacagagtaaacgaaagaaaagcagttgttaaaagttctaccgggccaaacttccttgtaaacctttcacaatttgtagaccctgaagacattgttccaggagcaagagtttgtttgaaccagcagactttagcaattgtagaagtacttcctaaagaaaaagactaccgagctatggcaatggaaattgaggaaaaaccagacatttcctttgaagatatcggtggtttaaacaaccagataagggacattaaagaagtagtagaactcccactcaaaaaccctgaattattcgaaaaagtgggtattgttccaccaaaaggagtattgctctatggtccacctggaactggaaaaacactccttgcaaaagctgttgcatatgaaaccaacgcatcatttgttagggttgttggttcagaactcgtcaaaaaattcatcggtgaaggtgcaaaacttgtaagagatgttttcaaacttgcaaaagaaaagtcaccttgcattatatttattgatgaaatcgatgcggttgcaagtaaaagaactgaatcattaaccggtggagatagagaagttcagagaactttaatgcaacttcttgcagaaatggatggttttgattcaagaggagatgtaaaaatcatcgctgcaacgaacagaccagacattttagatcctgcaatactcagacctggaagattcgatagaattattgaaatttcaatgcctgatgaagatggaagacttgacatcttgaaaatccacactgaaaaaatgaatcttaaaggcgtggatttaagagaagttgcaaaacttgcagaaaacatggtgggtgctgacttaaaagcagtatgtactgaagcaggtatgtttgcaataagagaagaaagagaattcatcaaaatggatgacttcaaagaagcaatctccaaaattaccggtaaaaaagaaaaatgcagttacgatatgccacaattaaccgtaatgtacggataa

SEQ ID NO: 5713 - protein, 407 aa, Methanococcus maripaludis C6
MSYPDDYSTDVEKNKMDLKEFKEKTQIAELESKVLRLELKNKDISRENVQIKKENEILKRELDKLRIPPLILGTILDRVNERKAVVKSSTGPNFLVNLSQFVDPEDIVPGARVCLNQQTLAIVEVLPKEKDYRAMAMEIEEKPDISFEDIGGLNNQIRDIKEVVELPLKNPELFEKVGIVPPKGVLLYGPPGTGKTLLAKAVAYETNASFVRVVGSELVKKFIGEGAKLVRDVFKLAKEKSPCIIFIDEIDAVASKRTESLTGGDREVQRTLMQLLAEMDGFDSRGDVKIIAATNRPDILDPAILRPGRFDRIIEISMPDEDGRLDILKIHTEKMNLKGVDLREVAKLAENMVGADLKAVCTEAGMFAIREEREFIKMDDFKEAISKITGKKEKCSYDMPQLTVMYG

SEQ ID NO: 5714 - DNA, 1221 bp, Halobacterium salinarum R1
  CDS (1)..(1221): transl_table=11
atgaccgataccgtcgaggacgtggagctcccctacgacgacagcgcctcacaacaggacaaactggaggcgctagaggagcaactctctaccctcgaagaggagaacgaggagatgcgagaccggctgcttgatgccaacgcagagaacaacaaataccagcagaagctcgaacgcctctcacacgagaacaagaagctcaagcagtcgccgctgttcatcgcgactgtccaggagctcaccgacgagggggccgtgatcaaacagcacggcaacaaccaggaagcgctcactgaggtcacggacgagctgcgtgccaccctcgaaccgggctcgcgggtcgcggtcaacaactcgctgtccgtcgtccgccaactggacgacgaggcagacgtgcgggctcgtgtcatggaagtcgatgactcccccgacgtgggctacgaggacatcggcggcctcgacgaccagctccgggaagtccgggagacagtcgagcttccgatgaaagaccccggcctgttcgagaccgtgggcatcaacccgccgagcggcgtgttgttgcacgggccgcccggcacgggcaagacgctgatggcgaaggccgtcgccagccagacggacgccagcttcatcaagatggccggcagcgagctcgtgcacaagttcatcggcgagggcgcgaagctcgtgcgcgatctcttccaggtcgcccgcgaccacgagcccgccgtcgtgttcatcgacgagatcgacgccatcgcctcgaagcgcacggactcgaagaccagcggggacgccgaggtccagcgcacgatgatgcagttgctctcggagatggacggcttcgacgagcgcggcgacatccgcatcatcgccgccaccaaccgcttcgacatgctcgaccgcgcgatcctgcggcccggccgcttcgaccgcctcatcgaggtcccccacccgaacgtgggcggccgcgagaagatcttccgcatccacacgcgggcgatgaacgtcgccgacagcgtcgacttcggcgagctcgccgccgacaccggggatctctccggtgcggacgtgaaagcgatctgtacggaagccgggatgttcgccatccgcgacgaccgcacggaggtccggatgcaggacttccagtcggcacgcgagaaactcgatcaggactccgagcccgccgccgccacggacgtctcccggacgttcgcgtag

SEQ ID NO: 5715 - protein, 406 aa, Halobacterium salinarum R1
MTDTVEDVELPYDDSASQQDKLEALEEQLSTLEEENEEMRDRLLDANAENNKYQQKLERLSHENKKLKQSPLFIATVQELTDEGAVIKQHGNNQEALTEVTDELRATLEPGSRVAVNNSLSVVRQLDDEADVRARVMEVDDSPDVGYEDIGGLDDQLREVRETVELPMKDPGLFETVGINPPSGVLLHGPPGTGKTLMAKAVASQTDASFIKMAGSELVHKFIGEGAKLVRDLFQVARDHEPAVVFIDEIDAIASKRTDSKTSGDAEVQRTMMQLLSEMDGFDERGDIRIIAATNRFDMLDRAILRPGRFDRLIEVPHPNVGGREKIFRIHTRAMNVADSVDFGELAADTGDLSGADVKAICTEAGMFAIRDDRTEVRMQDFQSAREKLDQDSEPAAATDVSRTFA

SEQ ID NO: 5716 - DNA, 1197 bp, Thermococcus onnurineus NA1
  CDS (1)..(1197): transl_table=11
atgagtattgaagatgtcgggataaaaccctccgaagagtacgatgattacatcatgtaccttaaaaagaggattaggcagcttgagctccaggtaagaacccttgaggcagataaggaaaggctcgagagagagctctcacggttgaggatggagatgtcaagactcaggcaaccaccggctttcgctggaacactgatagagcttctcgacgaggacagagcgatagtccagaactacaacggcccgcgctttgtcgtcaggatagctccctggatcgaaagggagaacttgaagcccggcgcgagggttgcccttgaccagaggacaatggccatcgttgagctccttccaagcgaaaaggatccaagtgtccttggcttcgaggtcattgagaggccgacagtaagttacaatgacataggcggtctggacaaacagctccaggagctgagggaggcaatagaactcccgctcaagcaccccgagctcttcgagaaggtcggcatagagccccccaagggtgttctcctctacggcccacccggttgtggaaagaccctcatggcaaaggccctagcccatgaggttaacgcaacattcatccgcgtcgttggaagcgaactcgtgagaaagttcatcggtgagggcgctcgtttagtccacgaactcttcgagctggcaaaggagaaggcacctgctatcatattcattgatgagattgacgccattggagcaaagagaatggacgagacaactggtggtgagagggaggtcaacagaacccttatgcagcttctagcggagatggacggcttcgacccaagcggcaatgtcaagatcatcgccgccaccaacaggccggacatcctcgatccagcactcctcaggccggggaggttcgacaggctcatagaagttccactgcccaacttcaagagcaggctcgagatactcaagatccacactaagaggatgaacctcaagggcgtcgacctgagaataatagcagaaatgactgagggagcgagcggtgcagatctgaaggccataaccatggaggctggaatgtttgccataagggacagacgtgagtacgtgacacaggaagacttcctcaaagctattgagaaagttcttggctcggagcagaggctctcccagcagatagccatgcacgaggtcatgtacggctga

SEQ ID NO: 5717 - protein, 398 aa, Thermococcus onnurineus NA1
MSIEDVGIKPSEEYDDYIMYLKKRIRQLELQVRTLEADKERLERELSRLRMEMSRLRQPPAFAGTLIELLDEDRAIVQNYNGPRFVVRIAPWIERENLKPGARVALDQRTMAIVELLPSEKDPSVLGFEVIERPTVSYNDIGGLDKQLQELREAIELPLKHPELFEKVGIEPPKGVLLYGPPGCGKTLMAKALAHEVNATFIRVVGSELVRKFIGEGARLVHELFELAKEKAPAIIFIDEIDAIGAKRMDETTGGEREVNRTLMQLLAEMDGFDPSGNVKIIAATNRPDILDPALLRPGRFDRLIEVPLPNFKSRLEILKIHTKRMNLKGVDLRIIAEMTEGASGADLKAITMEAGMFAIRDRREYVTQEDFLKAIEKVLGSEQRLSQQIAMHEVMYG

SEQ ID NO: 5718 - DNA, 1257 bp, Desulfurococcus kamchatkensis 1221n
  CDS (1)..(1257): transl_table=11
atgagggcattatatgaggggttcaaagccatgagcagcgatatgggtaaggataaccgggataacattatcgaaaaacttgacgcagtagtcagtggtgaagactatattaaatatcttgagtccaagataaggctcctcgagatggagcgtgaaaagctcttaatgaaggtgaactactataaatccgagctcgagaaacttatatcccctcccctgatagaaggagtgatagaatatgttctaggcgatggaagagccgtagttaaaagtaccactggacccaacctagtagtggcgatagccgacaacatcgacaagaacctgattaaacccggtgtaagagtagcccttaatcaacgtggctcggcaattgttgaagtactgccctcatacacggatacatatgtgcaattaatggaggtaatcgagaagccgagtgtgagatatgaggatataggcgggctctcagagcagatacgggagttgagagaggtggttgagctaccattgaaaaaccccaagttattcgaggagatagggatagagccacctaaaggagtcctattgtatgggccacctggatgcggtaagacaatgctggctaaagctgttgcagcagaatcaaatgccacattcatagctatagtgggcagtgagctcgtccagaaattcataggcgaaggagctaggatagttagggagctcttcgagctagcgaggaagaaggccccctcaatagtattcatagatgagctagacgctatagcagctaagaggatagatatagggacaagcggtgaaagagaagtacagaggacgctaatgcagttactggctgaaatagatggattcaggcctctcgacagggttaaaataattgctgccactaacagaatagatatactggatccagctatactgaggcccggaagattagataggatagtagaggtcccattgccagacttcaacggcaggatagagatattcaggatacatacaaggaggatgaagctagctgagaacattgatttccaggaattagccaggatgactgatggattcactggggcggagataaaagccgtggtaacagaagccggctacaatgcgatcagagataaccgtagacaagtcacaatgaacgacttcctaaaggccatagaaaaagtaaggagcaagaagaagctacggaggatagaagaatacgctgagaataaggaagataaggaggtcccattaatcttccaatag

SEQ ID NO: 5719 - protein, 418 aa, Desulfurococcus kamchatkensis 1221n
MRALYEGFKAMSSDMGKDNRDNIIEKLDAVVSGEDYIKYLESKIRLLEMEREKLLMKVNYYKSELEKLISPPLIEGVIEYVLGDGRAVVKSTTGPNLVVAIADNIDKNLIKPGVRVALNQRGSAIVEVLPSYTDTYVQLMEVIEKPSVRYEDIGGLSEQIRELREVVELPLKNPKLFEEIGIEPPKGVLLYGPPGCGKTMLAKAVAAESNATFIAIVGSELVQKFIGEGARIVRELFELARKKAPSIVFIDELDAIAAKRIDIGTSGEREVQRTLMQLLAEIDGFRPLDRVKIIAATNRIDILDPAILRPGRLDRIVEVPLPDFNGRIEIFRIHTRRMKLAENIDFQELARMTDGFTGAEIKAVVTEAGYNAIRDNRRQVTMNDFLKAIEKVRSKKKLRRIEEYAENKEDKEVPLIFQ

SEQ ID NO: 5720 - DNA, 1239 bp, Methanosphaerula palustris E1-9c
  CDS (1)..(1239): transl_table=11
atggccgacaccctgaatcatttacctgaacctcaaaaaggggaggatctctatcggtacctcctcgaaagggtgacaaacctggaggatcggaatacggaactccgggaacagctccgtcagatcgaagctgataagcgctatcttgaaacccagaaggtacgatacgaacgcgaggtgcggaagttcaagggggagatcgagcagatgaagtccccgcccctcgtgatcgggacggtcaccgacctgatcgatgagaacagggtgatcgtcagatcgagcgctggcccacgatttctggtcgggatatcgcagagtctcaatatcgaagagatcaaaccaggggcccgctgcaccttaaaccagcagtcgcttgcgatcgtcgagatactcccaaccaactatgatgcacagatttacgggatggaggtgatcgaagcgccttccgaacgctatgaggagatcggtgggcttgagaagcagataaacgagattcgggaggctgtcgagttacccctgaagaagccggaggtcttccggaagatggggatcgagccgccgaagggggtactcctccatgggccgcccggaaccgggaaaactctgctggctcgggctgtcgctcaccagaccgaggcacactttctccgggtggtcgggtctgaactggtgcagaagtacatcggcgagggggcccggttggtcagggagctcttcgaactggccaagaagaagagcccctccatcatcttcatcgatgagatcgatgccatcggagcttccaggaccgagtcgaacacctccggagaccgcgaggtgcatcggaccctgatgcagttgctggccgagatggacgggttcagcaaccgtggggatgtccggatcatcggggccacaaaccggatcgatatcctcgaccgcgccctccttcggccgggacggttcgatcggatcatcgagatcccggctccagatatcgaaggaagggtctcgatcctgaatatccactgtgccgggatgaacatcgacaaaaaagtcgacatcagagatatcgccacacggaccgatggaaaaaacggggcagatctgcgttctatctgcatggaagcagggatgttcgcgatcagatcggaccatgagatggtgacactggaggattttgaacaatcgatcgaaaaattctccaacgactttgaacgggactccctgatcaatacgtcaggggccatgtttgcatga

SEQ ID NO: 5721 - protein, 412 aa, Methanosphaerula palustris E1-9c
MADTLNHLPEPQKGEDLYRYLLERVTNLEDRNTELREQLRQIEADKRYLETQKVRYEREVRKFKGEIEQMKSPPLVIGTVTDLIDENRVIVRSSAGPRFLVGISQSLNIEEIKPGARCTLNQQSLAIVEILPTNYDAQIYGMEVIEAPSERYEEIGGLEKQINEIREAVELPLKKPEVFRKMGIEPPKGVLLHGPPGTGKTLLARAVAHQTEAHFLRVVGSELVQKYIGEGARLVRELFELAKKKSPSIIFIDEIDAIGASRTESNTSGDREVHRTLMQLLAEMDGFSNRGDVRIIGATNRIDILDRALLRPGRFDRIIEIPAPDIEGRVSILNIHCAGMNIDKKVDIRDIATRTDGKNGADLRSICMEAGMFAIRSDHEMVTLEDFEQSIEKFSNDFERDSLINTSGAMFA

SEQ ID NO: 5722 - DNA, 1218 bp, Halorubrum lacusprofundi ATCC 49239
  CDS (1)..(1218): transl_table=11
atgaccgacaccgtcgacgacgtcgagctgccctacgatgaggggtcggcgtcgagacaagagaagatcgagtccctccaggaggagctcgacgtgctggagtcacaaaacgaggagatgcgcgacaagctcctcgacgcaaacgccgagaacaacaagtaccagcagaagctcgaacggctcacacacgagaacaagaagctgaagcagtccccgctgttcgtggcgacggttcaagagatcacgcccgatggcgccgttatcaaacagcacgggaacaatcaggaggcactcaccgagataaccgccgagatgcgggagaagctcaacccggacgaccgggtcgcggtgaacaactcgctttccgtcgtcaagaagctggaaaaggaaacggacgtgcgcgcccgcgtgatgcaggtcgaacattcccccgacgtcacctacgctgacatcggcggactggaagagcagatgcaggaggtccgcgagaccgtcgagatgcccctcgaacaccccgatatgttcgaagatgtcggcattacaccgccgagcggtgtcctactgtacgggccgcccggcacggggaagacgatgctggcgaaggcggtcgccaacgagacggacgccacctttatcaagatggccggctccgagctcgtccacaagttcatcggtgagggcgcgaagctggtccgcgacctgttcgaggtcgcccgcgagaaccagccggccgtcctcttcatcgacgagatcgacgcgatcgcctcgaagcggactgactcgaagacctcgggcgacgccgaggtccagcgcacgatgatgcagctgctctccgagatggacggcttcgacgaacgcggcgaggtccggatcatcgccgccaccaaccgcttcgacatgctcgacccggcaatcttgcgtccgggccggttcgaccgcctcatcgaggtccccaagccgaacaccgagggtcgcgagatcatcttccagatccacacccggaagatgaacctcgcaagcgacatcaacttcgacgagctcgccgagatgacgccggacgcctcgggcgccgacatcaaggccatctgcacggaggccggaatgttcgcgatccgcgacgaccgcaccgaagttacgcttgacgacttcctcggggctcacgagaagctccagcaggacgacgagaccggcgctgacgattcgctggcgttcgcctga

SEQ ID NO: 5723 - protein, 405 aa, Halorubrum lacusprofundi ATCC 49239
MTDTVDDVELPYDEGSASRQEKIESLQEELDVLESQNEEMRDKLLDANAENNKYQQKLERLTHENKKLKQSPLFVATVQEITPDGAVIKQHGNNQEALTEITAEMREKLNPDDRVAVNNSLSVVKKLEKETDVRARVMQVEHSPDVTYADIGGLEEQMQEVRETVEMPLEHPDMFEDVGITPPSGVLLYGPPGTGKTMLAKAVANETDATFIKMAGSELVHKFIGEGAKLVRDLFEVARENQPAVLFIDEIDAIASKRTDSKTSGDAEVQRTMMQLLSEMDGFDERGEVRIIAATNRFDMLDPAILRPGRFDRLIEVPKPNTEGREIIFQIHTRKMNLASDINFDELAEMTPDASGADIKAICTEAGMFAIRDDRTEVTLDDFLGAHEKLQQDDETGADDSLAFA

SEQ ID NO: 5724 - DNA, 1185 bp, Aciduliprofundum boonei T469
  CDS (1)..(1185): transl_table=11
atggcaaaggaccttattgacagcgatgtgatagattacgattatgatcgtgatgagttgttgaggcagattaggatattggaagatgaaaagaggtatttagaatctgaactgagaagattgcagggggatattgagcgtttacgcaaggaaataaacagaatgaaatccccaccattacttgttgggacaatcgaagacataattgatgataatagaatcgttgtacgaagtagtgcaggcccaacatttatagtcaatgcttcatcctatgtacccaaggagaaaattaagcccggggcaaaagtggcgttaaataagcaaacatttgcaatagtgcatatgattccagaatcatacgatccagccataactgcagctgagataatagaaaaaccaagggtcacttacgatgatataggaggtttgaaaaagcagattagagagataagagaagccgttgagctacctcttttaaagccagaattgtacaagaaggttggtattgagccacctaagggggttttacttgcaggtcccccaggtacaggtaagacccttttagcaaaggccgttgctcaccacactcacgccacatttattcgcaccgttggaagcgagctcgttaggaaatacataggggaaggtgccaaactcgtgcgggaattatttgacttagcaagaaaaaaagcaccaagcatagttttcattgacgagatagatgccataggtgcccgccgtcttgatatggctacaagtggagatagagaagtacagcgtacccttatgcaacttcttgcagaattagatggttttgagcctttggataatgtaaagattatagcagctacgaatcgccccgacatacttgatgaagcattgcttaggcccgggagatttgataggataattcaagtaccatatcctgattacgatgctagaatcgaaattctaaagattcacacgaggagaatgaatttaaaagatgtgaaccttgaaaaaattgcaaagaaaactgacggttttagcggagcggatctgaaagtcatatgtatggaagcgggaatgttcgccataagggacgagagagattatgtaactcaggaagattttgaaaatgccataaggaaattcttgcatgctgacgatctcaggaaggagatacctggagagatgtttgcataa

SEQ ID NO: 5725 - protein, 394 aa, Aciduliprofundum boonei T469
MAKDLIDSDVIDYDYDRDELLRQIRILEDEKRYLESELRRLQGDIERLRKEINRMKSPPLLVGTIEDIIDDNRIVVRSSAGPTFIVNASSYVPKEKIKPGAKVALNKQTFAIVHMIPESYDPAITAAEIIEKPRVTYDDIGGLKKQIREIREAVELPLLKPELYKKVGIEPPKGVLLAGPPGTGKTLLAKAVAHHTHATFIRTVGSELVRKYIGEGAKLVRELFDLARKKAPSIVFIDEIDAIGARRLDMATSGDREVQRTLMQLLAELDGFEPLDNVKIIAATNRPDILDEALLRPGRFDRIIQVPYPDYDARIEILKIHTRRMNLKDVNLEKIAKKTDGFSGADLKVICMEAGMFAIRDERDYVTQEDFENAIRKFLHADDLRKEIPGEMFA

SEQ ID NO: 5726 - DNA, 1185 bp, Aciduliprofundum boonei T469
  CDS (1)..(1185): transl_table=11
atggcaaaggaccttattgacagcgatgtgatagattacgattatgatcgtgatgagttgttgaggcagattaggatattggaggatgaaaagaggtatttagaatctgaattgagaagattgcaaggggatattgagcgtttacgcaaggaaataaacagaatgaaatctccaccattacttgttggcacaattgaagacataattgatgataatagaatcgttgtacgaagtagtgcaggcccaacatttatagtcaatgcctcatcctatgtacccaaggagaaaattaagcccggggcaaaagtggcgttaaataagcaaacatttgcaatagtgcatatgattccagaatcatacgacccagccataactgcagctgagataatagaaaaaccaagagtcacttacgatgatataggaggtttgaaaaagcagattagagagataagagaagccgttgagctacctcttttaaaaccagaattgtacaagaaggttggtattgagccacctaagggggttttacttgcaggtcccccaggtacaggcaagacccttttagcaaaggctgttgcccaccacacccatgccacatttattcgcaccgttggaagcgagctcgttaggaaatacataggagaaggtgccaaactcgtgcgggaattatttgatttagcaagaaaaaaagcaccaagcatagttttcattgatgagatagatgccataggtgcccgccgccttgatatggctacaagtggagatagagaagtacaacgcactcttatgcagcttcttgccgagctagacggttttgagcctttggataatgtgaagattatagcagctacgaatcgccccgacatacttgatgaagcattgcttaggcccgggagatttgataggataattcaagtaccatatcctgattacgaggctagaatcgagattctaaagattcacacgaggagaatgaatttaaaagatgtgaaccttgaaaaaattgcaaagaaaactgacggttttagcggagcggatctgaaagtcatatgtatggaagcgggaatgttcgccataagggacgagagagattatgtaactcaggaagattttgaaaatgccataaggaaattcctacatgctgatgatctcagaaaggagatacctggagagatgtttgcataa

SEQ ID NO: 5727 - protein, 394 aa, Aciduliprofundum boonei T469
MAKDLIDSDVIDYDYDRDELLRQIRILEDEKRYLESELRRLQGDIERLRKEINRMKSPPLLVGTIEDIIDDNRIVVRSSAGPTFIVNASSYVPKEKIKPGAKVALNKQTFAIVHMIPESYDPAITAAEIIEKPRVTYDDIGGLKKQIREIREAVELPLLKPELYKKVGIEPPKGVLLAGPPGTGKTLLAKAVAHHTHATFIRTVGSELVRKYIGEGAKLVRELFDLARKKAPSIVFIDEIDAIGARRLDMATSGDREVQRTLMQLLAELDGFEPLDNVKIIAATNRPDILDEALLRPGRFDRIIQVPYPDYEARIEILKIHTRRMNLKDVNLEKIAKKTDGFSGADLKVICMEAGMFAIRDERDYVTQEDFENAIRKFLHADDLRKEIPGEMFA

SEQ ID NO: 5728 - DNA, 1197 bp, Thermococcus barophilus MP
  CDS (1)..(1197): transl_table=11
atgagtgacattaatgatgtcgtcaaatctcatgatgagtatgatgattacatcatttatctaaaaagaagaattagacagcttgaacttcaagtgagaacacttgaggcagacaaggagagacttgaaagggagctttcacgcttaagaatggagatgtcaaggttaagacagccaccagcttttgctggaactttgcttgagatactcgacgatgacagggcgatagttcagaattacaacggtccaagatttgtggtcagaatagcaccatggattgaaaaggaaaagctgaaaccggggagcagagtagcacttgaccagaggacaatggccgttgttgaaatactgccatcaccgaaggatccttctgtccttgggtttgaagttattgatagaccaaacgtgacatatgacgatattgggggattaaagaagcagctgcaagaactcagagaggcagttgagcttccgcttaaacatccagaactgtttgaaaaggttggaattgaaccacctaagggtgtcctcctttatggtccaccgggatgtggaaaaacattgatggccaaagctcttgcaagggaagttaatgcaacattcatcagggttgttggcagtgagcttgtaagaaaatacattggagaaggtgctcgattggtgcatgagctgtttgagctggcaaaagaaaaagcccccaccataatcttcatagatgaaattgatgccataggggctaaaagattagaggaaaccactggaggagaaagagaagttaacagaaccttaatgcaacttttagcagagcttgacggatttgatccaagaggtaacgttaaggtaatagcagcaactaacagacctgatatcttagatccagcacttcttaggccaggaagatttgacagattgattgaagttcctttacctgactttgcaggtagacttgaaatcctcaaggttcacacaaggaagatgaacctcaggaacgtggatcttagagttattgcagagatgacagaaggagcaagcggtgcagatctcaaagccatagcaacggaggctggaatgttcgccatcagagacagaagggagtatgtaacacaggaggattttctgaaggctgtggagaaggtatttgggtcagaacagagattggcacagcagatagctatgcatgaggttatgtatggctga

SEQ ID NO: 5729 - protein, 398 aa, Thermococcus barophilus MP
MSDINDVVKSHDEYDDYIIYLKRRIRQLELQVRTLEADKERLERELSRLRMEMSRLRQPPAFAGTLLEILDDDRAIVQNYNGPRFVVRIAPWIEKEKLKPGSRVALDQRTMAVVEILPSPKDPSVLGFEVIDRPNVTYDDIGGLKKQLQELREAVELPLKHPELFEKVGIEPPKGVLLYGPPGCGKTLMAKALAREVNATFIRVVGSELVRKYIGEGARLVHELFELAKEKAPTIIFIDEIDAIGAKRLEETTGGEREVNRTLMQLLAELDGFDPRGNVKVIAATNRPDILDPALLRPGRFDRLIEVPLPDFAGRLEILKVHTRKMNLRNVDLRVIAEMTEGASGADLKAIATEAGMFAIRDRREYVTQEDFLKAVEKVFGSEQRLAQQIAMHEVMYG

SEQ ID NO: 5730 - DNA, 1194 bp, Thermococcus sp. AM4
  CDS (1)..(1194): transl_table=11
atgggaagtttcgacgaggtaagccgcgatacgggttacgatgattacatcactttcctcaagaggaggataaggcagctcgaactccaggtcaggaccctggaggcggacaaagagagactggagagagagctctcaaggcttaggacggagatgtcaaggctaaggcagccgccggccttcgcgggcaacgtcatagaggttctcgacgatgacagggcgatagtccagaactacaacggaccgcgcttcgtcgtcagaatcgccccgtggatagagagggacaagctgaagccgggctcaagggtagctttagaccagaggacgatggcgatagtcgagctcctcccaacggagaaagaccccagcgtcctcggtttcgaggtcatagagaaacccagggtcacctatcaggacataggtggtcttgacagacagttagctgagctcagagaggccgtggagcttcccctcaagcacccggagctctttgaagaggttggaatcgagcccccgaagggtgtcctcctctacgggccacctggctgtggaaagacactcatggccaaggccgtggcgaaccacgtaaacgccaccttcatccgcgtcgttgggagcgaactggttaggaagttcatcggcgagggggcaaggctggttcacgagctcttcgagcttgcgaaggagaaggctccaacgataatcttcatcgacgagatcgacgcaataggcgcgaagaggatggacgagacgaccggcggcgagagggaagtcaacagaacgctcatgcagctcctggccgagatggacggcttcgatccaaggggaaacgtcaaggtcatagcggcaaccaacaggcccgacatactcgacccggccctgcttaggccagggcgcttcgacaggttgattgaagtcccgcttccggacttccgcggaaggctcgagatactcaaggtccacacgaggaggatgaacctcaggaacgtcgatctcagcatcatagccgatataactgaaggtgccagcggtgcggatctgaaggcgatagcgacggaagccggaatgttcgcgataagggacaggagaacatacgtaacgcaggaggacttcctcaaggcggttgataaggtcctgggagctgagaaaaggcttgcccaggcaatagcgatgcacgaggtcatgtacggctga

SEQ ID NO: 5731 - protein, 397 aa, Thermococcus sp. AM4
MGSFDEVSRDTGYDDYITFLKRRIRQLELQVRTLEADKERLERELSRLRTEMSRLRQPPAFAGNVIEVLDDDRAIVQNYNGPRFVVRIAPWIERDKLKPGSRVALDQRTMAIVELLPTEKDPSVLGFEVIEKPRVTYQDIGGLDRQLAELREAVELPLKHPELFEEVGIEPPKGVLLYGPPGCGKTLMAKAVANHVNATFIRVVGSELVRKFIGEGARLVHELFELAKEKAPTIIFIDEIDAIGAKRMDETTGGEREVNRTLMQLLAEMDGFDPRGNVKVIAATNRPDILDPALLRPGRFDRLIEVPLPDFRGRLEILKVHTRRMNLRNVDLSIIADITEGASGADLKAIATEAGMFAIRDRRTYVTQEDFLKAVDKVLGAEKRLAQAIAMHEVMYG

SEQ ID NO: 5732 - DNA, 1182 bp, Sulfolobus islandicus Y.G.57.14
  CDS (1)..(1182): transl_table=11
ttgtccggagattttgacacaataagggatgcttcttcttcagacgaggttcaattggttagattattagaagaaaaaatcaagtcattacagattgaaattgaaaatctaagaaaagaactaaattattataaagcagaaatggaaaaaatgttaagtcctccattaattgaggcagttgtattagacgttttaccagacggtagagtactagttagaagttcgtctggaccaaatttagtagtaaatgtagctagtcatattgatcaaaaattaataaagcctggagtatctgttgccttaaatcaaagaggatctactatattagaggttttgccacagaaggaagatccaattgtaaagacaatggaaattgtggaaaaacctaacgtaacttattctgagataggtggattagaagagcaaataaaggagttaagggaagttgtggaattacctttgaagaagcctgagatatttagagagataggagtagaaccaccaaagggagttttattatatggtccgccaggtactggaaagactatgttggcaaaagcagtagctactgagagtaatgccgtcttcattcatgttgttgcttcagagttcgcacaaaaatttgtgggggaaggtgctaggatagttagagagttatttgaaatggctaaaagaaaggcaccatcaataatcttcattgatgaaattgatgccataggtgctaagagaatagatataggaacaagtggagaaagggagatacagagaacgttaatgcagctcttggctgagctcgatggatttaatccgttggataacgttaagatcattgcagctacgaataggatagacatattggatcctgcattattgcgacctggtagatttgataggataatagaggttcccttaccagattttagaggaagaactgagatatttaacatatacctaaagaaaatgaaagtcgaggataatataaatcttgaattattgtcgcagctttcagaaggatttagtggtgctgatattaagaatgtttgtgttgaagcagcgtatatggcaattagggatggtaggaataaggttacaatgaaggatttagttgatgctataaccaagattaatgttaaaaggaataatatggagagtatgaaagagaggcgagagaagtatagctaa

SEQ ID NO: 5733 - protein, 393 aa, Sulfolobus islandicus Y.G.57.14
MSGDFDTIRDASSSDEVQLVRLLEEKIKSLQIEIENLRKELNYYKAEMEKMLSPPLIEAVVLDVLPDGRVLVRSSSGPNLVVNVASHIDQKLIKPGVSVALNQRGSTILEVLPQKEDPIVKTMEIVEKPNVTYSEIGGLEEQIKELREVVELPLKKPEIFREIGVEPPKGVLLYGPPGTGKTMLAKAVATESNAVFIHVVASEFAQKFVGEGARIVRELFEMAKRKAPSIIFIDEIDAIGAKRIDIGTSGEREIQRTLMQLLAELDGFNPLDNVKIIAATNRIDILDPALLRPGRFDRIIEVPLPDFRGRTEIFNIYLKKMKVEDNINLELLSQLSEGFSGADIKNVCVEAAYMAIRDGRNKVTMKDLVDAITKINVKRNNMESMKERREKYS

SEQ ID NO: 5734 - DNA, 1182 bp, Sulfolobus islandicus Y.N.15.51
  CDS (1)..(1182): transl_table=11
ttgtccggagattttgacacaataagggatgcttcttcttcagacgaggttcaattggttagattattagaagaaaaaatcaagtcattacagattgaaattgaaaatctaagaaaagaactaaattattataaagcagaaatggaaaaaatgttaagtcctccattaattgaggcagttgtattagacgttttaccagacggtagagtactagttagaagttcgtctggaccaaatttagtagtaaatgtagctagtcatattgatcaaaaattaataaagcctggagtatctgttgccttaaatcaaagaggatctactatattagaggttttgccacagaaggaagatccaattgtaaagacaatggaaattgtggaaaaacctaacgtaacttattctgagataggtggattagaagagcaaataaaggagttaagggaagttgtggaattacctttgaagaagcctgagatatttagagagataggagtagaaccaccaaagggagttttattatatggtccgccaggtactggaaagactatgttggcaaaagcagtagctactgagagtaatgccgtcttcattcatgttgttgcttcagagttcgcacaaaaatttgtgggggaaggtgctaggatagttagagagttatttgaaatggctaaaagaaaggcaccatcaataatcttcattgatgaaattgatgccataggtgctaagagaatagatataggaacaagtggagaaagggagatacagagaacgttaatgcagctcttggctgagctcgatggatttaatccgttggataacgttaagatcattgcagctacgaataggatagacatattggatcctgcattattgcgacctggtagatttgataggataatagaggttcccttaccagattttagaggaagaactgagatatttaacatatacctaaagaaaatgaaagtcgaggataatataaatcttgaattattgtcgcagctttcagaaggatttagtggtgctgatattaagaatgtttgtgttgaagcagcgtatatggcaattagggatggtaggaataaggttacaatgaaggatttagttaatgctataaccaagattaatgttaaaaggaataatatggagagtatgaaagagaggcgagagaagtatagctaa

SEQ ID NO: 5735 - protein, 393 aa, Sulfolobus islandicus Y.N.15.51
MSGDFDTIRDASSSDEVQLVRLLEEKIKSLQIEIENLRKELNYYKAEMEKMLSPPLIEAVVLDVLPDGRVLVRSSSGPNLVVNVASHIDQKLIKPGVSVALNQRGSTILEVLPQKEDPIVKTMEIVEKPNVTYSEIGGLEEQIKELREVVELPLKKPEIFREIGVEPPKGVLLYGPPGTGKTMLAKAVATESNAVFIHVVASEFAQKFVGEGARIVRELFEMAKRKAPSIIFIDEIDAIGAKRIDIGTSGEREIQRTLMQLLAELDGFNPLDNVKIIAATNRIDILDPALLRPGRFDRIIEVPLPDFRGRTEIFNIYLKKMKVEDNINLELLSQLSEGFSGADIKNVCVEAAYMAIRDGRNKVTMKDLVNAITKINVKRNNMESMKERREKYS

SEQ ID NO: 5736 - DNA, 1215 bp, Haloarcula marismortui ATCC 43049
  CDS (1)..(1215): transl_table=11
atgaccgacaccgtcgacgaggtcgatatgccgtacgacgatgacgcgtctcagcaacagaagatcgaggcgctgcaggagcggctagaggtgctcgaatcgcagaatgaggagatgcgcgacaagctgctggacgcgaacgcggaaaacaacaagtaccagcagaagctcgaacgacttacgcacgagaataagaagctcaagcagtcaccgctgtttgtcgcgaccgttcaggaactctccagcgatggcgtgattatcaaacagcacggcaacaatcaggaggccctgacagaggtcaccgacgagatgcgcgaggaactcgaacccgacgaccgcgtcgctgtcaacaactcgctctctatcgtcaagcagctcgatgacgagaccgacgttcgcgctcgcgtgatgcaggtcgaccagtcgccggatgtcacattcgccgacatcggcggtatcgaagagcagatggaagaagtccgcgagaccgtcgagatgccgctgaagagcccggagatgttcgaagacgtgggcatcgacccgccgagtggtgttctgctgcacggcccgcccggtaccggcaaaacgatgctagcgaaggccgtcgccaacgagaccgacgcgaccttcatcaagatggccggctccgaactggtccacaagttcatcggtgagggcgcgaagctcgtccgggacctgttcgaactggcccgtcaggaggagcctgccgtcgtcttcatcgacgagatcgacgctatcgcggccaagcgaacggagtcaaagacctccggcgacgccgaggttcagcggacgatgatgcaactactctcggagatggacggcttcgatgaccgcggtgacatccgtatcatcgccgcgacgaaccgcttcgacatgctcgaccgtgctatcctccgccccggccgcttcgaccgccttatcgaggtcccgaaccccgacctcgaaggtcgcaagcagatcttccagatccacacccgtagcatgaacgtcgccgacgacgtggacttcgaggcgctggccgaggatattcaggacgcctccggtgctgacgtgaaagccatctgtaccgaggccgggatgttcgccatccgcgacgaccggaccgaggtcacgatggcagacttccacaacgcttgggagaagattcagcaggaagagaccgacgacgaggacgtctcccggacgttcgcctga

SEQ ID NO: 5737 - protein, 404 aa, Haloarcula marismortui ATCC 43049
MTDTVDEVDMPYDDDASQQQKIEALQERLEVLESQNEEMRDKLLDANAENNKYQQKLERLTHENKKLKQSPLFVATVQELSSDGVIIKQHGNNQEALTEVTDEMREELEPDDRVAVNNSLSIVKQLDDETDVRARVMQVDQSPDVTFADIGGIEEQMEEVRETVEMPLKSPEMFEDVGIDPPSGVLLHGPPGTGKTMLAKAVANETDATFIKMAGSELVHKFIGEGAKLVRDLFELARQEEPAVVFIDEIDAIAAKRTESKTSGDAEVQRTMMQLLSEMDGFDDRGDIRIIAATNRFDMLDRAILRPGRFDRLIEVPNPDLEGRKQIFQIHTRSMNVADDVDFEALAEDIQDASGADVKAICTEAGMFAIRDDRTEVTMADFHNAWEKIQQEETDDEDVSRTFA

SEQ ID NO: 5738 - DNA, 1194 bp, Thermococcus kodakarensis KOD1
  CDS (1)..(1194): transl_table=11
atgagtattgagaacactgacgttcacccggagggttacgatgactacgtcactttcctcaaaaggagaatcaggcagctggagttacaggtgagaacgctggaggcagacaaggagagacttgagagggagctttcaaggctgagaatggaaatgtcaaggctcagacagccgccggcctttgcggggaacgtcatagaggtgctcgacgacgaaagggctatcgttcagaactacaacgggccgcgcttcgttgtcaggatagcgccttggatagagagggacaagctcaagccaggagccagggtggcactcgaccagaggacgatggcgatagtcgagctcctgccgagcgagaaagacccgagtgtcctcggtttcgaagtcattgaaaggcccaaggtcacctacaacgacataggcggacttgagaagcagctccaggaactcagggaggcaatagagctcccgctcaagcaccctgagctgtttgaacaggtcggcatcgagccgccgaagggagttctcctctacggcccgccgggctgtggaaagaccctgatggcaaaggcagttgccaatcacgtcaacgccactttcatccgcgtcgtcggaagcgagctggtaaggaagttcatcggagagggtgccagactggtccacgaactctttgagcttgccaaggagaaggcacccacgataatattcatagacgaaatagacgccataggcgcaaagaggatggacgaaaccaccggcggcgagagggaagtcaacagaaccctcatgcagctcctcgctgagatggacggcttcgacccgaggggcaacgtgaaggtcatagcggcaaccaacaggcccgatatactcgatccagcattactcaggccgggcaggttcgacaggctcatagaggttccgctcccggactaccagggcaggctcgagatactcaaggttcacacgagaaagatgaacctcaagggcgttgacctgcgcgttatagcggagataaccgagggggcgagcggagcagatctcaaggccatagctaccgaggcaggcatgttcgccatcagggacaggaggacgtacgttacgcaggacgacttcctcaaggccgtggataaagtcattggctcggagaagaggctggcacagcagatagctatgcacgaggtaatgtacggctga

SEQ ID NO: 5739 - protein, 397 aa, Thermococcus kodakarensis KOD1
MSIENTDVHPEGYDDYVTFLKRRIRQLELQVRTLEADKERLERELSRLRMEMSRLRQPPAFAGNVIEVLDDERAIVQNYNGPRFVVRIAPWIERDKLKPGARVALDQRTMAIVELLPSEKDPSVLGFEVIERPKVTYNDIGGLEKQLQELREAIELPLKHPELFEQVGIEPPKGVLLYGPPGCGKTLMAKAVANHVNATFIRVVGSELVRKFIGEGARLVHELFELAKEKAPTIIFIDEIDAIGAKRMDETTGGEREVNRTLMQLLAEMDGFDPRGNVKVIAATNRPDILDPALLRPGRFDRLIEVPLPDYQGRLEILKVHTRKMNLKGVDLRVIAEITEGASGADLKAIATEAGMFAIRDRRTYVTQDDFLKAVDKVIGSEKRLAQQIAMHEVMYG

SEQ ID NO: 5740 - DNA, 1191 bp, Sulfolobus acidocaldarius DSM 639
  CDS (1)..(1191): transl_table=11
ttgttcggggatgttgatagttataagaatcgtgaaaataataataattatgacgaaacgcttgtaaaacttcttgaagaaaaaatagaagctctcacaaaagaaatagataaattaagacaagatttaaattggtataaaactgaactagagaaactactggcacctccatacattgaagctacaatattagatatattaccagacggtaaggtaattgtaaggagctcttcgggaccaaacctagttgtaaatgtagccacgaacgtcgatgtttccaagttaaaaccaggcatgtctgttgcattaagtcaaagaggatcaacgattatagatattttaccaaatagagaagatataatagtaaaatcttttgaattaatagagaaaccaaatattcattattctgatataggaggtctagaagaccagataaacgaactaagagaggtagtcgaattaccattaaaaaataagaagttatttgaagagctaggaatagagccccctaaaggagtactattatatggaccccctggcactggaaaaaccatgcttgccaaagctgtagcagctgaaagtaacgccacatttattcatgttgtagcatcagaatttgcccagaaatttgtaggagaaggggcaagaatagttagagaagtctttgaattagctagaaagaaggctccatcaattatattcatagatgagcttgatgcgattgctgcaagaagaatagatattggtacaagcggtgaaagggaaattcaaagaacattgatgcagttattggctgaaattgatggatttaaggcactagataacgttaagataatagcagctacaaacagaatcgacatattagatcctgctatactaagacctggtaggtttgatagattaatagaggttccattaccagatgagaaaggtagaaaggagattttcaaaatctacctccagagaatgaggataaatgaaaacgataaattaaactatgatctaattgctcaactcacagacggttttagtggtgcagacattaagaacgtttgcaccgaagctggatatatggccataagagaaggaagagagtctattaaattccaagatattattagagccatagataaaataaagaaaaagaatttaaggaaagcgattaatacaagaaccgagaaatacttatga

SEQ ID NO: 5741 - protein, 396 aa, Sulfolobus acidocaldarius DSM 639
MFGDVDSYKNRENNNNYDETLVKLLEEKIEALTKEIDKLRQDLNWYKTELEKLLAPPYIEATILDILPDGKVIVRSSSGPNLVVNVATNVDVSKLKPGMSVALSQRGSTIIDILPNREDIIVKSFELIEKPNIHYSDIGGLEDQINELREVVELPLKNKKLFEELGIEPPKGVLLYGPPGTGKTMLAKAVAAESNATFIHVVASEFAQKFVGEGARIVREVFELARKKAPSIIFIDELDAIAARRIDIGTSGEREIQRTLMQLLAEIDGFKALDNVKIIAATNRIDILDPAILRPGRFDRLIEVPLPDEKGRKEIFKIYLQRMRINENDKLNYDLIAQLTDGFSGADIKNVCTEAGYMAIREGRESIKFQDIIRAIDKIKKKNLRKAINTRTEKYL

SEQ ID NO: 5742 - DNA, 1242 bp, Methanosarcina barkeri str. Fusaro
  CDS (1)..(1242): transl_table=11
gtgtcagaagacagttcaataggatcttctctggaagatatcaaaacaagggtagagttccagcttgagagcgggaagatcaatgctgaagatgtgaaatctctcttaaccgaaatagaaatcatgagggtccagaatgagaacatgaaggcccggctccttgaagcaagtgtagcaacgggcaggcaccttcaggaaatcaacaaattgaaagctcatctggaacagcttactgagcctcctctctttattgcaactattcttgaggtaaacggagaaattgcacttataaggcagcatgggaataatcaggaggttcttacccagatccctgaagagtgtattggaaagattgagcctggcatgagagttgcagtaaatggggcctactcaattatttccgtagtcagcagagctgccgatgtgcgggctcaggtaatggaactcattaactctcctggtgtggactacagcatgattggcgggctggatgacgtgcttcaggaagtccgggaaagcgttgaattgccacttaccgaaccccaacttttcgaggaaatcggaatcgaacctccttcaggtgtcctgctccacggggctccaggtacgggcaagactcttattgcaaaggctatagcttctcatgcaaaagcaacctttatccggatgtcgggatctgatctggtccagaaatttgtaggtgaaggctcaaggcttgtcaaagacattttccagcttgctagagataagtctccaagcattctctttatagatgaaatcgatgctgttggcagcatgaggacctatgacggaaccagtggctcggccgaggtcaacaggacaatgcttcagctccttgcggagatggacggttttgatcctaaaggcaatgtaaagatcgttgctgcaaccaacaggattgatctgctcgatcctgctctcctcaggcctggcaggtttgacagatctatcgaagttccacttcctgacgagaaaggaagggctgaaattcttaaaattcacactcgcaagatgaaccttgcagatgatgtggatttcgaaaaactggcaagagtcatgaccggtatgagcggggcagaaatcagtgttatcgtcaaagaagccggaatttttgtgctgcgtaggcgcggtaaacagattaccatggcagatttcctgaaggcacacgaaaaggtcgtaagcactgaagaacctaaaattcctcaggctatgttcgtataa

SEQ ID NO: 5743 - protein, 413 aa, Methanosarcina barkeri str. Fusaro
MSEDSSIGSSLEDIKTRVEFQLESGKINAEDVKSLLTEIEIMRVQNENMKARLLEASVATGRHLQEINKLKAHLEQLTEPPLFIATILEVNGEIALIRQHGNNQEVLTQIPEECIGKIEPGMRVAVNGAYSIISVVSRAADVRAQVMELINSPGVDYSMIGGLDDVLQEVRESVELPLTEPQLFEEIGIEPPSGVLLHGAPGTGKTLIAKAIASHAKATFIRMSGSDLVQKFVGEGSRLVKDIFQLARDKSPSILFIDEIDAVGSMRTYDGTSGSAEVNRTMLQLLAEMDGFDPKGNVKIVAATNRIDLLDPALLRPGRFDRSIEVPLPDEKGRAEILKIHTRKMNLADDVDFEKLARVMTGMSGAEISVIVKEAGIFVLRRRGKQITMADFLKAHEKVVSTEEPKIPQAMFV

SEQ ID NO: 5744 - DNA, 1215 bp, Natronomonas pharaonis DSM 2160
  CDS (1)..(1215): transl_table=11
atgactgacactgttgacgacgtcgacctcccctacgaggacggcgcgtcacagcaggagaaactggaggcgctggaggagcgtctcgaaatcctcgaacaacaaaacgaggagatgcgggacaaactcctcgacgctaacgcggagaacaacaaataccagcagaaactcgagcggctcacccacgagaacaagaagctcaagcagtcgccgctgtttgtcgccaccgtccaagagctcaccggcgagggcgtcatcatcaaacagcacggcaacaatcaggaagcgctcaccgaggttaccgacgacatgcgcgaagacctcgcgccggacgaccgtgtcgcggtgaacaactccctttccatcgtcaagcgactcgacagcgagaccgacgttcgcgcccgcgtgatgcaggttgacgagtcgcccgacgtctcctacgaggacatcggcggtatcgacgaccagatggaggaggttcgcgagaccgtcgagatgcccatcgaaagccccgagatgttcgacgaggtcggtatcgacccgccgtcgggtgtcctgctgcacgggccgcccgggacggggaagacgatgctggcgaaggcggtcgccaaccagaccgacgcgaccttcatcaagatggccggctccgaactcgtccacaagttcatcggcgagggcgcaaagttggtccgtgacctcttcgagctggctcggcaggaagtgcccgccgtcgtcttcatcgacgaaatcgacgccatcgcggccaagcgaaccgagtcgaagacctccggcgacgctgaagtccagcggacgatgatgcagttgcttgccgagatggatggcttcgaagaccgcggccagatatccatcatcgcggcgacgaaccgcttcgacatgctcgaccgcgcgattctccgtcccggccgcttcgaccggctcatcgaggtcccgaagcccgacttcgagggacgcgagattatcttcgatatacacacccgcgacatgaacgtcgccgacggggtcgactacaccgaactcgccgagatggctgacaacgcctccggggccgacatcaaggcgatctgtaccgaggccggtatgtacgccatccgcgacgaccgcactgaggtccgccacgaggacttcgagcaggcttggcggaagatacaggagaccgaagaagccgacgccgacgtctccaagacgttcgcctga

SEQ ID NO: 5745 - protein, 404 aa, Natronomonas pharaonis DSM 2160
MTDTVDDVDLPYEDGASQQEKLEALEERLEILEQQNEEMRDKLLDANAENNKYQQKLERLTHENKKLKQSPLFVATVQELTGEGVIIKQHGNNQEALTEVTDDMREDLAPDDRVAVNNSLSIVKRLDSETDVRARVMQVDESPDVSYEDIGGIDDQMEEVRETVEMPIESPEMFDEVGIDPPSGVLLHGPPGTGKTMLAKAVANQTDATFIKMAGSELVHKFIGEGAKLVRDLFELARQEVPAVVFIDEIDAIAAKRTESKTSGDAEVQRTMMQLLAEMDGFEDRGQISIIAATNRFDMLDRAILRPGRFDRLIEVPKPDFEGREIIFDIHTRDMNVADGVDYTELAEMADNASGADIKAICTEAGMYAIRDDRTEVRHEDFEQAWRKIQETEEADADVSKTFA

SEQ ID NO: 5746 - DNA, 1221 bp, Methanosphaera stadtmanae DSM 3091
  CDS (1)..(1221): transl_table=11
atggaagattcagaaccatttaatacaattgaaaataaagaaaacactgaaataacaaatttaattgataagcatgaagcaattgaacgaaatctaacttgggaagtaagaaaactagaaaaagataaagtattacttgaaaatgaaaacttaaggttagatcgtgaagttaaatcattgaaaagtgaaattaacagatttagaataccaccacttgtattagcaacagtatctgaaatattggatgataatcaagttgttgtaaaaagtagtactggaccatcatttctattaaaatatccagaaaaagattctgataggatagaaattggggcaagagtagctctaaatcaacaaacatttagtattgtggatattataacatcagaaaaagatccattagtatcaggtatggaaatagatgaaaaaccatccataacctatgatgaaattggtggactaaaagatcaagtattagaaacagtagaaacagtagaacttcctcttaaaaatcctaaaatctttgaagaagtaggtataactccaccaaaaggagttctcttctatggaccaccaggaactggtaagactttactagcaaaagcagtagcacatgaaacaaatgcaacttttataaaaatagtagcatcagaatttgttaaaaaatatataggtgaaggttcacgtttagtacgtggagtatttgaattagcaaaagaaaaagcaccagcaatcatatttattgatgaaattgatgcaatagcagcaaaaagattacaaggttcaacaagtggagatcgtgaagttcaaagaacactcatgcaacttctagcagaaatggatggatttgaatcaagaggaaatgttggtattatagcagcaactaataggccagatattctagatccagcacttgtaagaccaggtagatttgatcgtatcatagaagttccagttccagatgaagatggaaaattagaaattcttaagatacacactaaaaacatgtcattagatgtagatgtggatttaaaatacatagcccaaaatgcaaaatcagcatctggtgcagatcttaaatcaatatgtactgaggcaggtatgtttgcaataagagaagaacatcacagtgtctcagctaaaaactttgaagatgctttagaaaaagtaatgcataaaaataaagataaatcttctaaagaatcagtgatgtttgtataa

SEQ ID NO: 5747 - protein, 406 aa, Methanosphaera stadtmanae DSM 3091
MEDSEPFNTIENKENTEITNLIDKHEAIERNLTWEVRKLEKDKVLLENENLRLDREVKSLKSEINRFRIPPLVLATVSEILDDNQVVVKSSTGPSFLLKYPEKDSDRIEIGARVALNQQTFSIVDIITSEKDPLVSGMEIDEKPSITYDEIGGLKDQVLETVETVELPLKNPKIFEEVGITPPKGVLFYGPPGTGKTLLAKAVAHETNATFIKIVASEFVKKYIGEGSRLVRGVFELAKEKAPAIIFIDEIDAIAAKRLQGSTSGDREVQRTLMQLLAEMDGFESRGNVGIIAATNRPDILDPALVRPGRFDRIIEVPVPDEDGKLEILKIHTKNMSLDVDVDLKYIAQNAKSASGADLKSICTEAGMFAIREEHHSVSAKNFEDALEKVMHKNKDKSSKESVMFV

SEQ ID NO: 5748 - DNA, 1239 bp, Methanospirillum hungatei JF-1
  CDS (1)..(1239): transl_table=11
atggcagaagcagcccgccacccggatgacatgaaaactcctgacgagttataccggtatttagtagaccgggttgcaggaatggaatcgcaaaaccaggaattgaaagagcagatacggcaactggagtcagataagcgatatattgagacccagaagatccggtacgaacgggaggtcaggaagctgaaaagcgagattgaacacctgaaaacccccccgctcattgtcggaaccataactgatatcatcgattccggccgcgttgttgtgcgttctagtgcggggccccggtttctcgtcagggtgtcacaggcagttaatccgaccaccctgaaagccggtgtcagatgtaccttaaatcagcaatccctggctatagtggaagtgctcccaagcacatatgattcacaggtatatggtatggaactggttgacgctccgactgagacctatgaggacataggcggccttgaaaagcagattatggagattcgtgaagcggtcgaacttccgatgacaagacctgatctgtttgagaagataggtattaacccacccaaaggagtcctgctttatggccctcctggtacgggtaaaacccttcttgcaaaggccgttgcacatgagacccatgcaatcttcctgcacactgtcggttcagaactggtccagaaatatattggtgaaggagcccgtcttgtcagggaactatttgaccttgcgaaagagaaggcaccatcaatcgtattcatcgatgagattgatgccatcggtgcatcacgcacagaagccatgacctctggagaccgtgaagtgcagcgtacacttatgcaactcctcgcagccatggatggttttgagccacgtggtgatgtgaaaattatcggtgcaacaaaccggattgatattcttgatgcagctctcctgcgtccgggacgttttgacaggattattgaaattcctctccctgataccgaaggcagatactccattctgaaagtccatacccggtgtatgaacctgtcagaggatgttgatcttatggaggtagcccggcttactgaagggagaaacggagcagaactgaatgcaatctgtatggaagccggcatgtttgctatcaggaaggaacacccgcaagttgatcaggaagatttcctgactgctctaaataaattcagatgtgactttgagagggatcacaggttgacgaccgcaggcgttatgtttgcctga

SEQ ID NO: 5749 - protein, 412 aa, Methanospirillum hungatei JF-1
MAEAARHPDDMKTPDELYRYLVDRVAGMESQNQELKEQIRQLESDKRYIETQKIRYEREVRKLKSEIEHLKTPPLIVGTITDIIDSGRVVVRSSAGPRFLVRVSQAVNPTTLKAGVRCTLNQQSLAIVEVLPSTYDSQVYGMELVDAPTETYEDIGGLEKQIMEIREAVELPMTRPDLFEKIGINPPKGVLLYGPPGTGKTLLAKAVAHETHAIFLHTVGSELVQKYIGEGARLVRELFDLAKEKAPSIVFIDEIDAIGASRTEAMTSGDREVQRTLMQLLAAMDGFEPRGDVKIIGATNRIDILDAALLRPGRFDRIIEIPLPDTEGRYSILKVHTRCMNLSEDVDLMEVARLTEGRNGAELNAICMEAGMFAIRKEHPQVDQEDFLTALNKFRCDFERDHRLTTAGVMFA

SEQ ID NO: 5750 - DNA, 1281 bp, Methanococcoides burtonii DSM 6242
  CDS (1)..(1281): transl_table=11
atgacagaaacgatcgatgatgagccaagaagcaataattatagcttcagtggcattggtaatggggaacttgtttcaaaaagcgatgaggatttttcaaaatatctgctggataggatgaaacagcttgaatcgcgaaacaatctcctgaaagagcaatatgaccagatggaatcagataagcgttatattgaatcacaaaagcttaagtatgaacgagagacgcaccggcttcagtcggaaattgagaggttaaagtcccctcctcttgtagttgcaagcgtggtggatatttttgatgacgataaagctctgatcaggagcagtacaggtcctcagttccttgtgaatgtttcccaggacttcgaggatgatgatctgctagtcccgggggcaagggtggggcttaatcagcagactctggcagtggtcgatattatccccgaatcagatgaaccgctcattacggctatggaggttatcgattcacaggaagttgactattcgcaggtaggtggtctggaccaacagatacgggagataagcgaatctgtagaattgccgatcacaaaaccggaagcttttaagcgcattggtataacccctcctaaaggagtcctgcttttcggaccgcctggtacaggaaaaacattgcttgccaaagcggtggctcacagaacgaatgctacttttattagggtggtcggttctgaacttgtgcagaagtatattggcgatggcgcaaagcttgttcgtgatatcttcgagatggcaaggaagaaagcacctgcaatcatctttatcgatgaactggatgcgattgcagcgacacgtctgggggatacgaacggtgcggacagggaggttcaaaggacccttatgcaacttcttgctgagatggatggctttgacaacagaggtgatgtacgcataattgctgctaccaacagacctgacgttctcgatccggcaattgtaaggccgggcaggtttgaccgtatcatcgagataccattacctgatcaggatggtcgtgaaacgatcttccttattcatatggatatgctaaacattggtagcgatgtagatgtcaaaaagctggcctctcttacagaaggggcaagtggtgctgatatcggggcaatagtcatggaagctggtatgcttgctgtacgcaatgatagtgatcacattggcatgtctgacctgcttgatgcggttacaaaggtcatggtccccaaagagaacaatctcgatcattcggagaacatgttctggtga

SEQ ID NO: 5751 - protein, 426 aa, Methanococcoides burtonii DSM 6242
MTETIDDEPRSNNYSFSGIGNGELVSKSDEDFSKYLLDRMKQLESRNNLLKEQYDQMESDKRYIESQKLKYERETHRLQSEIERLKSPPLVVASVVDIFDDDKALIRSSTGPQFLVNVSQDFEDDDLLVPGARVGLNQQTLAVVDIIPESDEPLITAMEVIDSQEVDYSQVGGLDQQIREISESVELPITKPEAFKRIGITPPKGVLLFGPPGTGKTLLAKAVAHRTNATFIRVVGSELVQKYIGDGAKLVRDIFEMARKKAPAIIFIDELDAIAATRLGDTNGADREVQRTLMQLLAEMDGFDNRGDVRIIAATNRPDVLDPAIVRPGRFDRIIEIPLPDQDGRETIFLIHMDMLNIGSDVDVKKLASLTEGASGADIGAIVMEAGMLAVRNDSDHIGMSDLLDAVTKVMVPKENNLDHSENMFW

SEQ ID NO: 5752 - DNA, 1218 bp, Haloquadratum walsbyi DSM 16790
  CDS (1)..(1218): transl_table=11
atgagtgatactgtgaacgacgtcgacctcccgtatgatgaggagacggcgtcgcagcaggaaaagattcaggcgcttcgtgagcgtctcgacatcctcgagtcacaaaatgaggagatgcgagataaactgctggacgcgaacgcggagaataataaatatcaacagaaactcgaacggttgacacatgaaaataagaaactcaagcaatcgccgttatttgttgcaacggtacaagaaataacgaataacggcattgtaatcaaacaacacggtaataatcaggaggctcttaccgaggtcactgacgagatgcgaacggaattagagccagatactcgtgttgcggtcaacaattcgctttctgtcgtgaaacggcttgatgatgagactgatgtccgtgcacgagtgatgcaggtcgagcatagtccgtctatcagatatgatgatatcggtggactggaaacacaaatgcaagaagtacgcgaaaccgtcgagatgccactaaaatcgccagaaatgttcgagacggttggtattcagccaccatctggtgttcttttgtatggaccaccaggaactgggaagaccatgctcgcgaaagctgttgccaaccagacggatgccagtttcatcaaaatggctggttcagagttagttcataaattcattggtgagggagcaaaacttgttcgtgatctctttgaggtcgcccgtgagaatgaaccagcagttattttcattgatgagattgatgcgattgcctcaaagcggacagattcaaagacatctggagatgccgaggttcagcgaacaatgatgcagttactttcagaaatggacgggtttgatgaacggggcgatgttcgtattatcgcagcgacgaacagatttgatatgctcgatgaagcgattctccgcccaggtcggtttgaccgactgattgaggttccaaagcctggaattgagggtcggaagatcatcttccagattcatacccgcgagatgaatgtttccgataacgttgagtttgaacagttggcggagatggctgatgatgcttctggagcggatatcaaggcaatctgcacggaagccggaatgttcgctattcgcgaggatcgaacggagattggaatgggtgatttcattgaagcatgggagaaaatccaatccgaatcgaatactgatggcgatacggcacgtgcgttcgcatag

SEQ ID NO: 5753 - protein, 405 aa, Haloquadratum walsbyi DSM 16790
MSDTVNDVDLPYDEETASQQEKIQALRERLDILESQNEEMRDKLLDANAENNKYQQKLERLTHENKKLKQSPLFVATVQEITNNGIVIKQHGNNQEALTEVTDEMRTELEPDTRVAVNNSLSVVKRLDDETDVRARVMQVEHSPSIRYDDIGGLETQMQEVRETVEMPLKSPEMFETVGIQPPSGVLLYGPPGTGKTMLAKAVANQTDASFIKMAGSELVHKFIGEGAKLVRDLFEVARENEPAVIFIDEIDAIASKRTDSKTSGDAEVQRTMMQLLSEMDGFDERGDVRIIAATNRFDMLDEAILRPGRFDRLIEVPKPGIEGRKIIFQIHTREMNVSDNVEFEQLAEMADDASGADIKAICTEAGMFAIREDRTEIGMGDFIEAWEKIQSESNTDGDTARAFA

SEQ ID NO: 5754 - DNA, 1233 bp, uncultured methanogenic archaeon RC-I
  CDS (1)..(1233): transl_table=11
atgacaaagactgatactccacctgagtctttccccgagcccatgatcgagaaggtcggcatgctcgagaaggagaaacagacaatccaggaggagctcgagttgctcaggctccagtacgaggagcttaagtcccggctgcttgagtccaccatgattaataataataacctcaaggagatccagcgcctccagcaggagaacgctcacctccgccgcactccactcttcatcgccagcgtcatcgaaatcggtgagggaggcatggttatcctgcgccagcacggcaacaaccaggaagtcttaaccaagccctccgacgagctgctccagaagctgactctcggcaccagggtcgctgtcaacaactccctggccatcgtcaggatcctcgagaaaccggctgatgtacgcgcgagagtcatggaagtcatcgaggcccccagtgtcgactaccaggacatcggcggcctggagaaggagatccaggaagtagtggagacagtcgaactcccgctcacccagcccgagctgttcgccagcgtgggcatcgagccgcccagaggcgtgctcctttacgggcccccgggcaccggcaagaccctgctcgcgaaggcagtcgcccaccaggccaacgcgaccttcataaggatgtccggctctgagctggtccacaagttcatcggcgagggcgcccagctggtcagagacctgttccagatggcgagagacaaggcccccagcatcatcttcatcgacgagctggacgccgtgggaagccgcaggacccacgacggcaccaccggcagcgcagaggtcaacaggaccatgatgcagctcctgtccgagctggacggcttctcggagagaggcaacgtcaggatcatggccgcgaccaaccgcatagacatgctcgaccccgccatcctcaggccgggcaggttcgacaggatcatcgaggtacccctcccggacgagaagggcagggaacagatcttcaagatccacacccgcaagatgacgaccgaggaagacgtggacgtccagaagatcatcgaagagatggaaggcgcaagcggcgcagacgtcaaggccatcgtcaccgaggccggcatgttcgccatccgcaggcgcagcaaagccgtcaacatggaagacttcgagaaggccatcgacaaggtgctccacaaggaaacgcccgtcgaggttccgacctccaccgtctacgcgtaa

SEQ ID NO: 5755 - protein, 410 aa, uncultured methanogenic archaeon RC-I
MTKTDTPPESFPEPMIEKVGMLEKEKQTIQEELELLRLQYEELKSRLLESTMINNNNLKEIQRLQQENAHLRRTPLFIASVIEIGEGGMVILRQHGNNQEVLTKPSDELLQKLTLGTRVAVNNSLAIVRILEKPADVRARVMEVIEAPSVDYQDIGGLEKEIQEVVETVELPLTQPELFASVGIEPPRGVLLYGPPGTGKTLLAKAVAHQANATFIRMSGSELVHKFIGEGAQLVRDLFQMARDKAPSIIFIDELDAVGSRRTHDGTTGSAEVNRTMMQLLSELDGFSERGNVRIMAATNRIDMLDPAILRPGRFDRIIEVPLPDEKGREQIFKIHTRKMTTEEDVDVQKIIEEMEGASGADVKAIVTEAGMFAIRRRSKAVNMEDFEKAIDKVLHKETPVEVPTSTVYA

SEQ ID NO: 5756 - DNA, 1254 bp, uncultured methanogenic archaeon RC-I
  CDS (1)..(1254): transl_table=11
ttgcaaacgatacttatggcggaaggatctggcctcgactttactggagaagtgcctctgagcgacttttctaagtacctgcttgacagggtgaagcagctggaagaacgaaatgtccgcttaaaggaggaatacaggaagatcgagctggaaaagaagtcggtcgagaacaagaaggtacagtacgagcgcgagatccggaagctcacgtcggagctggacaggctcaagactcctccgctcatcgtcggtaccatactggatgtcatggccaacggtaaaatgatcatcaaatcctcgaccgggccaaaattcgtggttaactcttcccagttcatcaactctaaagaggtctacccgggcgccaaagtcgccctgaaccagcagtccctcgccgtgatcgaggtgctgcccacggttaaggacccctccgtactgggcatggaggtagtcgactctcccgaaatagactaccagagcatcggaggcctggaagcccagatcaacgagctgaaggagacggtcgagctgccgctcctcaagcccgagctcttccagaaggtcggtatcgagccgcccaagggcgtactgctctacgggcctccaggaaccggcaagactttgcttgccaaagccgtagcaaaccggactaaggctacgttcatcaggatcatcggctctgagctagtgcagaagtacatcggcgaaggagcgagaatggtcagggagctcttcgagctggcgaaggagaaatcgccatccatcatcttcatcgacgagatcgattccatcggcgccaagaggctcgacagcatcacctctggcgaccgggaagtccagcgcacgctcgtccagctgctcgctgagatggacggcttcgacccgagaggtaatgtccgtatcctggcggccaccaacaggccggacatcctggacccggcactgttgaggccgggccggttcgaccgcatgatcaaagtacccatgcccaccgctgaggccagggagcagatcctcaagatccacgcccgcaagatgaacctcgcggacgacgtggacctcaggaagatcgccctcatcacggacgagtccagcggcgccgatctctccgccatcgtcatggaggccggcatgttcgccatccgcaacaaccgcgacgtagtggactcctcagacttcaacgcggcagttgccaaagtcatgggcgagcgaaaccggagcatggcacaggaaagcggtgttatgtttgcttag

SEQ ID NO: 5757 - protein, 417 aa, uncultured methanogenic archaeon RC-I
MQTILMAEGSGLDFTGEVPLSDFSKYLLDRVKQLEERNVRLKEEYRKIELEKKSVENKKVQYEREIRKLTSELDRLKTPPLIVGTILDVMANGKMIIKSSTGPKFVVNSSQFINSKEVYPGAKVALNQQSLAVIEVLPTVKDPSVLGMEVVDSPEIDYQSIGGLEAQINELKETVELPLLKPELFQKVGIEPPKGVLLYGPPGTGKTLLAKAVANRTKATFIRIIGSELVQKYIGEGARMVRELFELAKEKSPSIIFIDEIDSIGAKRLDSITSGDREVQRTLVQLLAEMDGFDPRGNVRILAATNRPDILDPALLRPGRFDRMIKVPMPTAEAREQILKIHARKMNLADDVDLRKIALITDESSGADLSAIVMEAGMFAIRNNRDVVDSSDFNAAVAKVMGERNRSMAQESGVMFA

SEQ ID NO: 5758 - DNA, 1215 bp, Methanosaeta thermophila PT
  CDS (1)..(1215): transl_table=11
atgaacgagcctcaaagtggacccgacttctcgaagtacatcctggacaggatgaagcagcttgaggagcgcaacctcgccctgagggagcagaaggaccgcgcggagggggagaagcggctcatagagaaccagaagctcaagtacgagcgcgaggcccggaagctccgcagcgagctggagcgtctgcgtgtcgggcccatgatcgtcggtacggttgtggaggttctcgacgagagcagggtgatcgtgaagtcgagcacaggcccaagacttgtcgtgagcgtctcgcagttcatcgaggaggagctgaggccgggtgtgcaggtcggtctgaaccagcagacgttcgcggtgatgtgcgtgcttccatcaccgcgcgatcccatggtctttggaatggaggtcgaggaggtgccggacgtgacgttcgccagcatcggtggcctcgacagccagatcgccgagctcagggagatcgtggagcttcccctcaagaggcctgaactcttccatgcggtcgggatcgagccgccaaagggagttctcctctatggacctccgggcaccggcaagacacttctcgccaaggcggtggccaacagcacagaggcgacgttcctgagggtggtcgggagcgagtttgtccagaagtacataggagagggcgccaggcttgtccgggagctcttcgatctggcaaagagcagagcccccgcgatcatattcatagatgagctcgatgcgataggctccaggcgcatagatggggcgacgagcggtgatcgtgaggttcagaggacactgatgcagctgctcgctgagatggacggattcgacccgcgtggagaggtcaagataataggcgccacaaacaggccggacatgctcgatcctgctctactccggcccggaaggttcgacagggcgatatacgttccgctgcccaaccgtgaaggcagatacgcgatcctcctcatacacacaaagggcatgagcctcggcccggatgttgatctgaggagcatcgcggatctcacagagaacgcgagcggtgctgatctgaaggcgatagtcaccgaggctggaatgtctgcgatccgcgaggagcggacgcaggtgctccagagggatttcgagcgtgcgatcgcaaaggtgcttcaggcggagaggcatggtgcaggcgatgagctggatctcccgaactacgcgtga

SEQ ID NO: 5759 - protein, 404 aa, Methanosaeta thermophila PT
MNEPQSGPDFSKYILDRMKQLEERNLALREQKDRAEGEKRLIENQKLKYEREARKLRSELERLRVGPMIVGTVVEVLDESRVIVKSSTGPRLVVSVSQFIEEELRPGVQVGLNQQTFAVMCVLPSPRDPMVFGMEVEEVPDVTFASIGGLDSQIAELREIVELPLKRPELFHAVGIEPPKGVLLYGPPGTGKTLLAKAVANSTEATFLRVVGSEFVQKYIGEGARLVRELFDLAKSRAPAIIFIDELDAIGSRRIDGATSGDREVQRTLMQLLAEMDGFDPRGEVKIIGATNRPDMLDPALLRPGRFDRAIYVPLPNREGRYAILLIHTKGMSLGPDVDLRSIADLTENASGADLKAIVTEAGMSAIREERTQVLQRDFERAIAKVLQAERHGAGDELDLPNYA

SEQ ID NO: 5760 - DNA, 1215 bp, Methanosaeta thermophila PT
  CDS (1)..(1215): transl_table=11
atgacggatcaggaaagcctgatcgagtcgttcaccaagaggatcgcagcgctcgagagggagaacagggcactggctgaggaggccgaggccctccgcatggagcgcgaggaggccagagcgaagctcttcgagtctctcatatccaacaagaagtatctgcgcgagcttgagcgtcttaagaaggagaacgctctgctgaggcgcatgccgctgtttctggccacagtgatagaggtgggcgacgactacgtcatgctcagacagcatgggaacaaccaggagttcataaccacagctcctccggagataatggagaagctgcagccgaacagcagggttgcaataaacaactccctgacgatagtgaggctcctggagagatctgtggatgctagggcgaagatgatggagctgatagaggctccgaatgtgacgtatgatgatgttggaggtctcgactctcagatacaggagatacgcgagacagttgagcttccgctgacaaggccggagctcttcagcagcataggaatagagccgcccagaggagtcctcctctacgggctccccggcacagggaaaacgctcctcgccaaggctgttgcgcaccatgccagggcaacgttcatacacatgtcgggaagcgagctggtccacaagttcatcggagagggtgcgcagctcgtgcgggatatattccagatggcaagagataaggcaccatcaatagtattcatcgatgagattgacgctgtggggagcatcaggacgcatgacggcacaacgggcagcgcagaggtcaacaggacgatgatgcagctcctggccgagatggatggtttcagggagagaggtgatgtcaagatcatcgccgccacaaacaggatagacatcctggatcctgcgctcctccggccgggcaggttcgacaggatcatcgagataccgatgcccaacgaggttgcgaggctgaagatacttgagatccacacgaagaagatgaagctggctggtgatgtggatctctcatccatagcgaagcagacagagggagcaagcggtgctgagctgaaggccattgcggtcgaggccggaatgaacgcgataaggagagaggccaccgttgtcaccatggaggacttcagacaggctgtgaagaaggttctcggtgaggaagagaaggcagacgagtctctcaggatgttctactga

SEQ ID NO: 5761 - protein, 404 aa, Methanosaeta thermophila PT
MTDQESLIESFTKRIAALERENRALAEEAEALRMEREEARAKLFESLISNKKYLRELERLKKENALLRRMPLFLATVIEVGDDYVMLRQHGNNQEFITTAPPEIMEKLQPNSRVAINNSLTIVRLLERSVDARAKMMELIEAPNVTYDDVGGLDSQIQEIRETVELPLTRPELFSSIGIEPPRGVLLYGLPGTGKTLLAKAVAHHARATFIHMSGSELVHKFIGEGAQLVRDIFQMARDKAPSIVFIDEIDAVGSIRTHDGTTGSAEVNRTMMQLLAEMDGFRERGDVKIIAATNRIDILDPALLRPGRFDRIIEIPMPNEVARLKILEIHTKKMKLAGDVDLSSIAKQTEGASGAELKAIAVEAGMNAIRREATVVTMEDFRQAVKKVLGEEEKADESLRMFY

SEQ ID NO: 5762 - DNA, 1218 bp, Methanococcus voltae A3
  CDS (1)..(1218): transl_table=11
atgaactatcctgaagactattcaagcgaaataaacgaattagaccttgatgaatacaaggaaaggaattatataatggatttggaaaataaaatattgagagctgaattgaaaaataaagacatatcaagagaaaatagtcagcttaaaaaagaaaatgaaattttaaaaagagaattggataaattaagaatccctccactcataatgggtactgtaattgacaaaataagttccagaaaagtagttgttaaaagctctacgggcccaaatttcttagtaaatatttcacaatttgtagaccctgaagaaatagtgcctggcgaaagagtttgtttgaaccagcaaacacttgcggtagttgaagttctttccaaagaaaaagattatcgagctatggctatggaaatagaagaaaaacctaacattacatttgatgaaattggtggattaagcacccaaattagagacattaaagaagtagtagaattaccattaaaaaagccagaactatttgaaaaaataggtatagtacctccaaagggtattttactatacggtccaccgggaactggtaaaactcttctcgcaaaagctgtagcttatgaaacaaatgcttcatttatcagagtagtaggttctgaattggttaaaaaattcattggcgaaggtgctaaattagttagggatgtatttaagttggcaaaagaaaaatctccatgtattatattcattgatgaaattgacgctgttgcaagtaaaagaacagagtcattaactggtggagatagagaagttcaaagaacattgatgcaattattagctgaaatggatggttttgattctcgaggagatgtaaaaataattgctgccacgaatagacctgacatcctagattctgcaatattaagacctggtcgatttgatagaatcattgaaatagccaatcctaacgaagatggtagaattgaaatcttaaaaatacatacatcaaaaatgaatttgaaaaatgtaaatttaagagatgttgcaaaattaactgaaggaatggttggtgcagatttaaaagctgtttgtactgaagcaggtatgtttgcaatccgtgaagatagggaatatattaaattaagagattttgaagaagctatcgaaaaaattaaaagcaaaactacgcctaaagaagaaataaaaccacaagtatcattaatgtatggataa

SEQ ID NO: 5763 - protein, 405 aa, Methanococcus voltae A3
MNYPEDYSSEINELDLDEYKERNYIMDLENKILRAELKNKDISRENSQLKKENEILKRELDKLRIPPLIMGTVIDKISSRKVVVKSSTGPNFLVNISQFVDPEEIVPGERVCLNQQTLAVVEVLSKEKDYRAMAMEIEEKPNITFDEIGGLSTQIRDIKEVVELPLKKPELFEKIGIVPPKGILLYGPPGTGKTLLAKAVAYETNASFIRVVGSELVKKFIGEGAKLVRDVFKLAKEKSPCIIFIDEIDAVASKRTESLTGGDREVQRTLMQLLAEMDGFDSRGDVKIIAATNRPDILDSAILRPGRFDRIIEIANPNEDGRIEILKIHTSKMNLKNVNLRDVAKLTEGMVGADLKAVCTEAGMFAIREDREYIKLRDFEEAIEKIKSKTTPKEEIKPQVSLMYG

SEQ ID NO: 5764 - DNA, 1314 bp, Saccharomyces cerevisiae (strain YJM789)
  CDS (1)..(1314)
atgagtgaagaacaggaccctttattagcaggattgggggaaacgtccggcgacaatcacacccaacagtcacacgaacaacaaccagaacaaccacaggaaacggaagaacatcatgaagaggagccttctagagtggatcctgaacaggaggcccataacaaggccttgaatcaattcaagagaaagctgctagaacacagaaggtatgatgatcaattgaagcagcgccgtcaaaatatacgagatctagagaagttatatgacaagactgaaaacgacataaaagctttgcaaagtattggacaattgattggcgaagtcatgaaggaattatctgaagagaaatatatagtgaaggcctcttcgggcccacgttatattgtcggagttaggaattcggtagatcgctctaaattaaagaaaggggtgagagtcaccttagatatcaccactttgactataatgagaattttgcccagagagacagatccactggtgtataatatgaccagttttgaacaaggtgaaatcacttttgatggtattggtggtttgactgagcaaatcagagaattaagggaggttatagaattaccattgaagaacccagaaattttccagagggtcggtatcaaacctccaaagggtgtgctactatatggtccccctggtactggtaaaactttactagcgaaggcagttgctgctacgattggagccaacttcattttctctccagcgtctggtattgtggataaatacattggtgagtctgctcgtattattagagaaatgtttgcatatgcaaaggaacacgaaccttgcatcatttttatggatgaagtggatgctattggtggtagaagattcagtgaaggtacttcagcagaccgtgaaattcaacgtacgttgatggagttgttgacccagatggatggttttgataatcttggacagactaaaatcatcatggctacgaatagaccagatactttagatcctgctttgttgaggcccggtagactacacagaaaagttgaaattccattgccaaatgaggccggcagattagaaattttcaaaattcatactgcaaaagtcaaaaaaacaggggaatttgacttcgaggctgctgtaaaaatgagtgatggtttcaatggtgctgatattcgtaactgtgcaactgaagcaggttttttcgccataagagatgaccgtgatcacatcaaccctgatgatttaatgaaagccgtaagaaaagtagctgaagttaagaaattggaaggcactatagaataccaaaaattatga

SEQ ID NO: 5765 - protein, 437 aa, Saccharomyces cerevisiae (strain YJM789)
MSEEQDPLLAGLGETSGDNHTQQSHEQQPEQPQETEEHHEEEPSRVDPEQEAHNKALNQFKRKLLEHRRYDDQLKQRRQNIRDLEKLYDKTENDIKALQSIGQLIGEVMKELSEEKYIVKASSGPRYIVGVRNSVDRSKLKKGVRVTLDITTLTIMRILPRETDPLVYNMTSFEQGEITFDGIGGLTEQIRELREVIELPLKNPEIFQRVGIKPPKGVLLYGPPGTGKTLLAKAVAATIGANFIFSPASGIVDKYIGESARIIREMFAYAKEHEPCIIFMDEVDAIGGRRFSEGTSADREIQRTLMELLTQMDGFDNLGQTKIIMATNRPDTLDPALLRPGRLHRKVEIPLPNEAGRLEIFKIHTAKVKKTGEFDFEAAVKMSDGFNGADIRNCATEAGFFAIRDDRDHINPDDLMKAVRKVAEVKKLEGTIEYQKL

SEQ ID NO: 5766 - DNA, 1317 bp, Caenorhabditis briggsae
  CDS (1)..(1317)
atgggaaacaagatggcgatgccccaacaaaagcgtgagaagccgacacacgccgcgatgaaggtcgccgtgaagagcggacgacgtggcatcgagaatgcgaacaagttgccgacggtggcgccgagacgtcagtgtcttgtgagacttcttaagatgaatcggattcatgactatcttcagttggagaaagagtacatctcccgccaaaacagccgaactggccgtccattggctcaacagaaacgccgagagcagcaactggtccaaagtcttcgtgggactccaacaacactcgccagaatccacgaactttttgatgatgagaagcacgcggtcgtagtggtcgaaggatcgaaacgcgaatggtacatccccatcctctccatagttgacaaggatcttctccgtctgaatgccctcgtcatggtgaaagctggtggaatgttcaaaacggtgccaacagctatcgtcggagttctcgacgacaaaattgacagcaacgccagcggacacaaagtggagaagtgccccaaagaatcgtttgatgatattggaggatgtgagagtcagattcaggagctcaaagagtctgttgaacttccactcacccatccggaatactatgaggagatgggaatcactgctcctaaaggtgtcattctttatggagaacctggaactggaaagacgcttcttgccaaggcagtggccaattcaacatcagccacttttattcgagcaactggatcggacctggtgcagaagaatagtggagagggagctcgtttggttcgacaaatctttcaaatggctaaagatcaagcgccatcaatcgtcttcatcgatgagattgatgcagttggaacgaaacgattcgacacttcttcacgtggagagcaggaagttcaacggacacttttggagttgttgaatcagttggatggatttgaaagtcgtggagatgtcaaagtgattatggccaccaaccgtattgactctttggaccccgccttgattcgtcctggacgtattgatcggaaaattgagttgccacggccggatgagaagactcggcagaagatttttgggatccacacatctggaatgacacttcaaaaagcggtgacctacgaatcagtcctgggaaaagagaagagtatcagtggtgccgaaattaaagccgtgtgcaccgaggctggaatgatggcacttcgatcgcaacgaaaatgtgtgggagccgatgattttgagaaggctctcaagtcggtgatgttgagcaaaaaggctggagcacccgaatctttcttctcgtga

SEQ ID NO: 5767 - protein, 438 aa, Caenorhabditis briggsae
MGNKMAMPQQKREKPTHAAMKVAVKSGRRGIENANKLPTVAPRRQCLVRLLKMNRIHDYLQLEKEYISRQNSRTGRPLAQQKRREQQLVQSLRGTPTTLARIHELFDDEKHAVVVVEGSKREWYIPILSIVDKDLLRLNALVMVKAGGMFKTVPTAIVGVLDDKIDSNASGHKVEKCPKESFDDIGGCESQIQELKESVELPLTHPEYYEEMGITAPKGVILYGEPGTGKTLLAKAVANSTSATFIRATGSDLVQKNSGEGARLVRQIFQMAKDQAPSIVFIDEIDAVGTKRFDTSSRGEQEVQRTLLELLNQLDGFESRGDVKVIMATNRIDSLDPALIRPGRIDRKIELPRPDEKTRQKIFGIHTSGMTLQKAVTYESVLGKEKSISGAEIKAVCTEAGMMALRSQRKCVGADDFEKALKSVMLSKKAGAPESFFS

SEQ ID NO: 5768 - DNA, 1398 bp, Aspergillus fumigatus (strain CEA10 / CBS 144.89 / FGSC A1163)
  CDS (1)..(1398)
atgggagacgtcgccgtggagagctcggcgaccaacgtcacacctagcaagtcggcgccattcgataccatccctaatatagactctctccaaggcacagatgcagatggaggtgatgagtatgcgactctgaagagactccagagacacttagaatacatccaacttcaagaagaatacattaaggatgaacaaaggagtttgaagcgagagctcgtccgtgcacaggaggagattaaacggatacagagcgtgcctctcgtgatcggacaattcatggaagctatcgatcagaacaccggtatcgtgcagtcgtcaactggctcgaattatgtcgtgcgcatcctttcaacacttgaccgcgagaagctcaagccctcctcctctgtcgccctgcaccgccattccaatgcccttgtcgatattttacctccggaagcagattcgtccattgccatgctcggtgagaacgaaaagccagatgtcacttacgccgacgtcggtggattggacatgcagaagcaggagatcagggaggcagtcgagctacccttgacgcatttcgacctttacaaacagattggtattgatccgcctcgtggtgttctactttacggccctcccggtactggtaagacgatgttggtcaaagctgtggcaaatagtacaactgccagctttattcgtgtgaacggttcggagtttgtccaaaaatacttgggagaaggacctcgtatggttcgcgacgtgttcagaatggctcgtgagaactcacccgccattatcttcattgatgaaatcgatgcaattgctaccaaacgattcgatgcccagactggtgccgatcgtgaagttcagcgtatcctgcttgagctcctcaatcagatggacggcttcgaacagacaagcaatgtgaaggtcatcatggccaccaaccgagcggatactctggatccggccctcttacgtccaggtcgtctggatcgtaagattgagtttccgtcgctgcgtgaccgacgggagcgtcgactgatttttaccacaatcgcatcgaagatgtctttgtccccagaggtcgatctggattcactcatcgtacgaaacgagccactctctggtgctgttattgccgccatcatgcaggaagctggactacgtgctgttcgcaagaaccgctacaatatcatccagtctgaccttgaggacgcctatgctgctcaggtcaagaccggccaggaagcggacaggtatgctcttccctgcattcaaatctatctcaccaccagttctaactattgcgttacaggctcgatttctaccggtagattatgtacaatcataggcatttatgaggtgggaacaggacctgtgccacacgaaagaataattatggattga

SEQ ID NO: 5769 - protein, 465 aa, Aspergillus fumigatus (strain CEA10 / CBS 144.89 / FGSC A1163)
MGDVAVESSATNVTPSKSAPFDTIPNIDSLQGTDADGGDEYATLKRLQRHLEYIQLQEEYIKDEQRSLKRELVRAQEEIKRIQSVPLVIGQFMEAIDQNTGIVQSSTGSNYVVRILSTLDREKLKPSSSVALHRHSNALVDILPPEADSSIAMLGENEKPDVTYADVGGLDMQKQEIREAVELPLTHFDLYKQIGIDPPRGVLLYGPPGTGKTMLVKAVANSTTASFIRVNGSEFVQKYLGEGPRMVRDVFRMARENSPAIIFIDEIDAIATKRFDAQTGADREVQRILLELLNQMDGFEQTSNVKVIMATNRADTLDPALLRPGRLDRKIEFPSLRDRRERRLIFTTIASKMSLSPEVDLDSLIVRNEPLSGAVIAAIMQEAGLRAVRKNRYNIIQSDLEDAYAAQVKTGQEADRYALPCIQIYLTTSSNYCVTGSISTGRLCTIIGIYEVGTGPVPHERIIMD

SEQ ID NO: 5770 - DNA, 1269 bp, Penicillium chrysogenum (strain ATCC 28089 / DSM 1075 / Wisconsin 54-1255)
  CDS (1)..(1269)
atgggagacgttgccgtggagaacccggcgaacaacgtcacgcctcttaccaagccaggtgcgcttgacgccctcgccaacttggattcccttgatggcacaggggccgatggaaatgatgaatatgctaccctcaagaggctacagagacatctcgagtatatccaactgcaggaggaatacatcaaggatgagcagaggagcttgaagcgggaactagtccgggcacaagaagagatcaagcgcatacagagtgtgccattggtcatcggacagtttatggaggcaatcgatcaaaataccggcattgtgcaaagctcgaccggttctaattacgtcgtccgcatcctctccactctcgaccgcgagaagctgaagccctcatcctcggttgcccttcaccgacactccaatgcccttgtcgatattcttcctcccgaggctgactcctcgattgcaatgctgggtgagaatgagaagcccgatgtgacgtatgcagatgtcggtggcttggatatgcagaagcaggagattcgggaggccgtcgagttgcctttgacgcatttcgaactctacaagcaaatcggtattgaccctccccgtggtgtcttgctctatggccccccgggaactggaaagaccatgctggtgaaagccgtggccaatagcacaaccgccagcttcatccgtgtcaacggatcagagtttgtacagaagtatctaggagagggacctcgcatggtccgtgacgtgttccggatggctcgtgagaactccccagccattatcttcattgacgaaatcgatgcgatcgccacgaagcgtttcgatgcccagactggtgccgatcgtgaagtccagcgtattctgttggagttgctgaaccagatggacggtttcgaacaaaccagcaacgtcaaggtcatcatggccaccaaccgagccgacaccctggacccggctttgctgcgtcctggtcgtctggaccgaaagatcgagttcccgaacctgcgtgaccgacgtgagcgccgattgatcttcacaaccattgcagcaaggatgtcactgtccccagaagtggacctcgatgccctgatcgtgcgcaacgacccattgtctggtgctgtcattgctgctatcatgcaggaggccggtctgcgggctgtccgcaagaaccgttacaatattatccaatcggaccttgaagatgcttatgctgtccaggtcaagactggacaggatgatgaccgtcctgacttctaccggtaa

SEQ ID NO: 5771 - protein, 422 aa, Penicillium chrysogenum (strain ATCC 28089 / DSM 1075 / Wisconsin 54-1255)
MGDVAVENPANNVTPLTKPGALDALANLDSLDGTGADGNDEYATLKRLQRHLEYIQLQEEYIKDEQRSLKRELVRAQEEIKRIQSVPLVIGQFMEAIDQNTGIVQSSTGSNYVVRILSTLDREKLKPSSSVALHRHSNALVDILPPEADSSIAMLGENEKPDVTYADVGGLDMQKQEIREAVELPLTHFELYKQIGIDPPRGVLLYGPPGTGKTMLVKAVANSTTASFIRVNGSEFVQKYLGEGPRMVRDVFRMARENSPAIIFIDEIDAIATKRFDAQTGADREVQRILLELLNQMDGFEQTSNVKVIMATNRADTLDPALLRPGRLDRKIEFPNLRDRRERRLIFTTIAARMSLSPEVDLDALIVRNDPLSGAVIAAIMQEAGLRAVRKNRYNIIQSDLEDAYAVQVKTGQDDDRPDFYR

SEQ ID NO: 5772 - DNA, 1395 bp, Penicillium chrysogenum (strain ATCC 28089 / DSM 1075 / Wisconsin 54-1255)
  CDS (1)..(1395)
atgggtcaacagcagtctaatctaggcggcggccctggaggccctggaggcgatgacaaggataagaagaaggacaagcctaagtacgagcctcccccaccacctaccacccgtcttggaaagaagaagcgcaaggctgccggcccaagcactgcctccaagctccccgatatctatcctacatcgcgatgcaagctacgataccttcgcatgcagcgtgttcacgaccacctgctgttagaagaagagtacgtcgagaatatggaacgaatgcgcaaggccaaggcccgggcaacccaggatcccgccaagggaggtggcgacttggatgtgatggatcggaacgccgacgagcggagtcgagttgatgacatgcgaggcagcccgatgggtgtcggcaacttggaagagttgattgatgatgaccatgctattgtctcaagtgctaccggccctgagtactacgtctcgatcatgtctttcgttgataaagatctcctcgagccgggtgccagtattcttctacaccacaaatcagtgtccgtcgtcggcgtactgacggaggagtctgacccccttgtctcggtgatgaagttggacaaggcaccgactgaatcatacgccgatattggtggtctcgagcagcaaatccaggaagttcgagaatccgtggagctgcccttgctacaccccgagctgtatgaagagatgggtatcaagccccctaagggtgtgattctttacggtgccccaggtaccggaaagacgctgcttgctaaggccgtcgccaaccagaccagcgcaaccttcctccgcattgttggtagtgagctgatccagaagtatctgggtgatggccctcgcctggttcgccagatcttctcagttgctgctgaccacgctccatcaatcgtgttcatcgacgagattgatgccatcggtactaagcgatatgagtcacaatctggcggtgagagggaaatccagcgaaccatgctggagcttctgaaccagctggatggattcgatgatcgcggtgatgtgaaggtcatcatggctaccaacaagatcgaaaccctggatccagctttgatccgacctggtcgtattgaccgtaagattctcttcgagaatccagaccaaaacaccaagaagaagattttcactctgcacacatcgaagatgtctctcggcgacgacgttgacctcgaggagttcatcaaccagaaggatgatctctctggtgccgacatccgggctatctgtactgaagctggcttgatggccttgagagagcgccgcatgagggtgcagatggacgatttccgagctgctcgtgagcgcatcatgaagactaagcaggacggcggtcctgtggagggtctatacttgtaa

SEQ ID NO: 5773 - protein, 464 aa, Penicillium chrysogenum (strain ATCC 28089 / DSM 1075 / Wisconsin 54-1255)
MGQQQSNLGGGPGGPGGDDKDKKKDKPKYEPPPPPTTRLGKKKRKAAGPSTASKLPDIYPTSRCKLRYLRMQRVHDHLLLEEEYVENMERMRKAKARATQDPAKGGGDLDVMDRNADERSRVDDMRGSPMGVGNLEELIDDDHAIVSSATGPEYYVSIMSFVDKDLLEPGASILLHHKSVSVVGVLTEESDPLVSVMKLDKAPTESYADIGGLEQQIQEVRESVELPLLHPELYEEMGIKPPKGVILYGAPGTGKTLLAKAVANQTSATFLRIVGSELIQKYLGDGPRLVRQIFSVAADHAPSIVFIDEIDAIGTKRYESQSGGEREIQRTMLELLNQLDGFDDRGDVKVIMATNKIETLDPALIRPGRIDRKILFENPDQNTKKKIFTLHTSKMSLGDDVDLEEFINQKDDLSGADIRAICTEAGLMALRERRMRVQMDDFRAARERIMKTKQDGGPVEGLYL

SEQ ID NO: 5774 - DNA, 1389 bp, Penicillium marneffei (strain ATCC 18224 / CBS 334.59 / QM 7333)
  CDS (1)..(1389)
atgggtaatcaacaatccaatatcggaggcggtggcccaggcggagatggaaatgacgacaagagcaagaaggataagcccaagtacgaaccaccaccacaacccaccactcgcctcggccgcaagaagcgcaaggcagccggtcccaatgccgctgccaaacttcctaccattctcccgacggcacgatgtaaattacgatacctgaggatgcagcgaatccacgatcatctgttgcttgaggaggagtatgttgagaaccaagaacgcatccgaaaggcaaaggcactggccaccacccagccatcggcaacaggagatctcgatgctctagaccgaaacgccgatgaaagaggtcgtgtcgatgatatgcgaggtagcccgatgggtgttggaaatctggaggagatgattgacgacgaccacgccatcgtttccagtgccaccggtccggagtactacgtctcaatcatgtcttttgttgacaaagatctattggagccgggtgctagtattctattacaccacaagtcggtgtcagtggttggtgttttgacagacgacacggatcccttagtgtcggtcatgaagcttgacaaagctccgacagagtcctacgcggatatcggtggtctagagactcagattcaggaagttcgagaagccgtcgagttgccattgttgcaccccgagctctacgaggagatgggtatcaaaccgcccaagggtgttatcttatacggtagccccggtactggaaagacgcttctggcgaaagccgtggcgaaccagaccagtgctactttcctgcgtatcgtcggtagtgagttgattcaaaaatacctgggtgacggtcctcgactagtacgacagattttcacggtggcggcagaacatgccccatctattgtctttattgatgagatcgacgctattggtacaaagcgatacgactcgacttcaggtggtgagcgagagattcagcgaaccatgttggagttgctgaaccagcttgatggattcgacgaccgaggagatgtcaaggtgattatggcgacgaacaagattgagagcttggatcctgctttgattcgaccaggtcgtattgaccgtaagattttgtttgagaatcctgaccaaaacaccaagcgcaagatcttcctcctccacaccggcaaaatgtccctcagcgaagacgtcgacctcgaagaattcatcagccaaaaggacgacctttccggcgccgatatcaaggccatctgctccgaggccggcctcatggccctccgcgagcgtcgtatgagagtgcaaatggaggatttccgaactgctcgtgagcgtgtccttaagactaagaatgagagtgagccggagggattgtatttgtaa

SEQ ID NO: 5775 - protein, 462 aa, Penicillium marneffei (strain ATCC 18224 / CBS 334.59 / QM 7333)
MGNQQSNIGGGGPGGDGNDDKSKKDKPKYEPPPQPTTRLGRKKRKAAGPNAAAKLPTILPTARCKLRYLRMQRIHDHLLLEEEYVENQERIRKAKALATTQPSATGDLDALDRNADERGRVDDMRGSPMGVGNLEEMIDDDHAIVSSATGPEYYVSIMSFVDKDLLEPGASILLHHKSVSVVGVLTDDTDPLVSVMKLDKAPTESYADIGGLETQIQEVREAVELPLLHPELYEEMGIKPPKGVILYGSPGTGKTLLAKAVANQTSATFLRIVGSELIQKYLGDGPRLVRQIFTVAAEHAPSIVFIDEIDAIGTKRYDSTSGGEREIQRTMLELLNQLDGFDDRGDVKVIMATNKIESLDPALIRPGRIDRKILFENPDQNTKRKIFLLHTGKMSLSEDVDLEEFISQKDDLSGADIKAICSEAGLMALRERRMRVQMEDFRTARERVLKTKNESEPEGLYL

SEQ ID NO: 5776 - DNA, 1269 bp, Penicillium marneffei (strain ATCC 18224 / CBS 334.59 / QM 7333)
  CDS (1)..(1269)
atggctgacgtcgccgttgagaatcccgccaacaacgtggcaatccacaagcgctctgcaccagcagattcagtacccatcatagattcattagagggaaccggtaatgacagcggcgatgaatatgctaccttgaaacgcctccaaaggcatctagagtacattcatctccaagaggagtacatcaaagacgagcaaaggagtttaaaaagagaattagtacgagcccaagaagagatcaagcggatacaaagtgttcctctggtaatcggccagttcatggaagctatcgatcagaatactggaattgtacaatcgtcaaccggttctaactacgtcgtccgcatcctttccacccttgaccgagagaagttaaagccatcgtcatccgttgctttgcataggcactcaaactcactcgtcgatattctcccacccgaagcggattcgtctattgcgatgctaggtgcccacgagaagccggacgttacgtatgctgatgtcggtggattggatatgcagaaacaagagatcagagaggccgtggaactgccgcttacacataccgacctttatcagcagattggtattgatcctccccgtggtgtattgctctatggtcccccaggtaccggaaagaccatgttggtcaaggcggtggcgaacagcacaacagccagtttcatccgtgttgtcggctccgaatttgttcagaaatacctgggagaaggtcctcgtatggtccgcgatgtcttccgtatggctcgtgaaaactcgccggccattattttcatcgatgagatcgacgccattgccaccaagcgttttgatgctcaaaccggagcggatcgtgaagtgcagcgtattcttctagaacttctgaaccagatggacggtttcgaccaaggtagcaatgtcaaggtcatcatggccaccaatcgagcagatacactagatcccgccctgctacgaccaggtcgtcttgaccgcaagattgaatttccttctctccgggatcgccgcgagcgtcgtctgatcttcacaactattgcagctaaaatgtctctctcgcccgaggtggatttagattcgttgattgtgcgaaacgagcctctatccggtgctgttattgccgccatcatgcaagaagccggtctacgtgctgtccgcaagaaccgttacaacatcatccagtctgacctggaagatgcatattccagccaagtcaagactagccaggaagctgataaattcgatttctacaagtga

SEQ ID NO: 5777 - protein, 422 aa, Penicillium marneffei (strain ATCC 18224 / CBS 334.59 / QM 7333)
MADVAVENPANNVAIHKRSAPADSVPIIDSLEGTGNDSGDEYATLKRLQRHLEYIHLQEEYIKDEQRSLKRELVRAQEEIKRIQSVPLVIGQFMEAIDQNTGIVQSSTGSNYVVRILSTLDREKLKPSSSVALHRHSNSLVDILPPEADSSIAMLGAHEKPDVTYADVGGLDMQKQEIREAVELPLTHTDLYQQIGIDPPRGVLLYGPPGTGKTMLVKAVANSTTASFIRVVGSEFVQKYLGEGPRMVRDVFRMARENSPAIIFIDEIDAIATKRFDAQTGADREVQRILLELLNQMDGFDQGSNVKVIMATNRADTLDPALLRPGRLDRKIEFPSLRDRRERRLIFTTIAAKMSLSPEVDLDSLIVRNEPLSGAVIAAIMQEAGLRAVRKNRYNIIQSDLEDAYSSQVKTSQEADKFDFYK

SEQ ID NO: 5778 - DNA, 990 bp, Penicillium marneffei (strain ATCC 18224 / CBS 334.59 / QM 7333)
  CDS (1)..(990)
atggaagctatcgatcagaatactggaattgtacaatcgtcaaccggttctaactacgtcgtccgcatcctttccacccttgaccgagagaagttaaagccatcgtcatccgttgctttgcataggcactcaaactcactcgtcgatattctcccacccgaagcggattcgtctattgcgatgctaggtgcccacgagaagccggacgttacgtatgctgatgtcggtggattggatatgcagaaacaagagatcagagaggccgtggaactgccgcttacacataccgacctttatcagcagattggtattgatcctccccgtggtgtattgctctatggtcccccaggtaccggaaagaccatgttggtcaaggcggtggcgaacagcacaacagccagtttcatccgtgttgtcggctccgaatttgttcagaaatacctgggagaaggtcctcgtatggtccgcgatgtcttccgtatggctcgtgaaaactcgccggccattattttcatcgatgagatcgacgccattgccaccaagcgttttgatgctcaaaccggagcggatcgtgaagtgcagcgtattcttctagaacttctgaaccagatggacggtttcgaccaaggtagcaatgtcaaggtcatcatggccaccaatcgagcagatacactagatcccgccctgctacgaccaggtcgtcttgaccgcaagattgaatttccttctctccgggatcgccgcgagcgtcgtctgatcttcacaactattgcagctaaaatgtctctctcgcccgaggtggatttagattcgttgattgtgcgaaacgagcctctatccggtgctgttattgccgccatcatgcaagaagccggtctacgtgctgtccgcaagaaccgttacaacatcatccagtctgacctggaagatgcatattccagccaagtcaagactagccaggaagctgataaattcgatttctacaagtga

SEQ ID NO: 5779 - protein, 329 aa, Penicillium marneffei (strain ATCC 18224 / CBS 334.59 / QM 7333)
MEAIDQNTGIVQSSTGSNYVVRILSTLDREKLKPSSSVALHRHSNSLVDILPPEADSSIAMLGAHEKPDVTYADVGGLDMQKQEIREAVELPLTHTDLYQQIGIDPPRGVLLYGPPGTGKTMLVKAVANSTTASFIRVVGSEFVQKYLGEGPRMVRDVFRMARENSPAIIFIDEIDAIATKRFDAQTGADREVQRILLELLNQMDGFDQGSNVKVIMATNRADTLDPALLRPGRLDRKIEFPSLRDRRERRLIFTTIAAKMSLSPEVDLDSLIVRNEPLSGAVIAAIMQEAGLRAVRKNRYNIIQSDLEDAYSSQVKTSQEADKFDFYK

SEQ ID NO: 5780 - DNA, 1341 bp, Zea mays
  CDS (1)..(1341)
  misc_feature (1041)..(1041): k is g or t
atgggacaaggttctcccggcgggatgggcaagcagcccggccttccgggcgaccgcaagcagggagacggcaagaaagagaagaaatatgaaccacccgctgccccttcccgtgtcggccggaagcagaagcggcagaagggctccgaggcggcggcgcggctccccgccgtggcgccgctctcaaagtgccgccttcgcctactcaagctcgaacgcgtcaaggactaccttctcatggaagaggagttcgttgccagccaggagcgcctgcgccccagcgaggataagacggaggaggaccgatccaaggtcgacgacctccgcggcactcccatgaacgtcggatcgctggaggagatcatcgacgagacccatgccatcgtctcctcgtccgtcggtcccgagtactacgtcgggatactttccttcgttgataaggaccagctcgagcctggatgtgccattctgatgcacaacaaggttctgtcagtggttggtattttgcaagacgaagttgatcctatggtttctgtgatgaaagttgaaaaggcacctttggagtcttatgctgacattggtggcttggatgctcaaattcaagaaatcaaagaagcagttgaacttcccttaacacatcctgagctatatgaggacattgggatcaggcctccgaagggagttatactatatggggaacctggaacagggaaaactctactcgcaaaggctgttgccaattctacttcagcaacgttcttgcgtgttgttgggagtgaattgatccaaaagtaccttggtgatggtcccaagcttgttagagaattgttcagggtggctgatgatctttctccttcaattgtctttattgatgagattgatgctgttgggacaaagaggtacgatgctcattctggtggcgagcgtgagattcagagaaccatgttggagttgttaaatcagctggatggttttgattcaagagtagatgttaaagttattctagcaacaaatcgtattgagagtcttgatccagccttkcttcgcccaggtcgaattgacagaaagattgaattccctttacctgatgtcaagactaggcggcgcatcttccagatacacacatcgaaaatgacactggctgatgatgtaaacctagaagagtttattatgtcaaaagatgagttttcaggtgctgacatcaaggccatttgtactgaagctggcttgcttgctttgagagagcggcggatgaaggtgacgcatgcagacttcaagaaggccaaagaaaaggttatgttcaagaagaaagaaggcgtgccggagggcttatatatgtga

SEQ ID NO: 5781 - protein, 446 aa, Zea mays
  misc_feature (347)..(347): The Xaa at location 347 stands for Leu, or Phe.
MGQGSPGGMGKQPGLPGDRKQGDGKKEKKYEPPAAPSRVGRKQKRQKGSEAAARLPAVAPLSKCRLRLLKLERVKDYLLMEEEFVASQERLRPSEDKTEEDRSKVDDLRGTPMNVGSLEEIIDETHAIVSSSVGPEYYVGILSFVDKDQLEPGCAILMHNKVLSVVGILQDEVDPMVSVMKVEKAPLESYADIGGLDAQIQEIKEAVELPLTHPELYEDIGIRPPKGVILYGEPGTGKTLLAKAVANSTSATFLRVVGSELIQKYLGDGPKLVRELFRVADDLSPSIVFIDEIDAVGTKRYDAHSGGEREIQRTMLELLNQLDGFDSRVDVKVILATNRIESLDPAXLRPGRIDRKIEFPLPDVKTRRRIFQIHTSKMTLADDVNLEEFIMSKDEFSGADIKAICTEAGLLALRERRMKVTHADFKKAKEKVMFKKKEGVPEGLYM

SEQ ID NO: 5782 - DNA, 1278 bp, Enterocytozoon bieneusi (strain H348)
  CDS (1)..(1278)
atgggaaataaacacggtgagcctcaacatcaaaaagataatactagcataaatctgaaaaggaagaaaagagtgaaggaggttaaaaacaaaaccagcttgccactatttgcacctaccctcaaatgtaagctacgaaatttaaagttaatgaaaattaaagctttcttgtgcattgaagatgacttgctaaatttgtgtgattgtagtattgaaaatgaaaataaactaaacgacaaatacatagttgaacagctgcgaggaaatccattggcagttggaacactggaggaatttgtcgatgaaaagcatgccatagtttcgtctcctaatggttttgaatactatgttaatatttttagttttgttgataaagatttactggagcctggatgtactgttttgcttaacaataaagataacaatattgtaggggtgctgaattcgcctgatgttgatccgttggttagtgtaatgaaattagaaaaggcacctacagagacatacagcgacattggcggattagaacatcagattcaagagataaaagagtgtgttgaactcccattaactaatcctgagctatatcaggaaatggggataaaagcgcccaaaggggttatattatatggtgagcccggaacaggaaaaacattactggcaaaagcagttgcaaatcaaacgagtgccacatttttacgaattgttggttctgagttaattcaaaaatacatgggagatggaccaaaacttgtaagagaaatgtttaaagttgcggatgcccatgcaccatcgataatttttattgatgaaattgatgccataggaggcaagagatttgatagtgattcatctggggcacgtagcgttcagtcgacgatgcttgagttattaaatcagcttgatgggtttgatacacgtgaggatattaaggttattatggcgactaacaaaattgagaatctcgatcctgcactaattcgacctggacgtattgatagaaaaatctactttggacttcccgatgcagaaacaaagaggtctatatttaaaattcatactagcaaaatgatactttcaaaagatgtaaatttagaagaaattatcacagctaaagaagacttaaatggctcagacattaaagctatttgcaccgaggctggaatgaatgcattacgagaaagacgaaaatatgttgaaatgaatgattttaaaaaagctcgagaaaagatattttatattaaaagtaacgatacgcctcatggattttatatttaa

SEQ ID NO: 5783 - protein, 425 aa, Enterocytozoon bieneusi (strain H348)
MGNKHGEPQHQKDNTSINLKRKKRVKEVKNKTSLPLFAPTLKCKLRNLKLMKIKAFLCIEDDLLNLCDCSIENENKLNDKYIVEQLRGNPLAVGTLEEFVDEKHAIVSSPNGFEYYVNIFSFVDKDLLEPGCTVLLNNKDNNIVGVLNSPDVDPLVSVMKLEKAPTETYSDIGGLEHQIQEIKECVELPLTNPELYQEMGIKAPKGVILYGEPGTGKTLLAKAVANQTSATFLRIVGSELIQKYMGDGPKLVREMFKVADAHAPSIIFIDEIDAIGGKRFDSDSSGARSVQSTMLELLNQLDGFDTREDIKVIMATNKIENLDPALIRPGRIDRKIYFGLPDAETKRSIFKIHTSKMILSKDVNLEEIITAKEDLNGSDIKAICTEAGMNALRERRKYVEMNDFKKAREKIFYIKSNDTPHGFYI

SEQ ID NO: 5784 - DNA, 1155 bp, Enterocytozoon bieneusi (strain H348)
  CDS (1)..(1155)
atgacaaatattgtagattattgtacctttaaaaaaactgaaaaaattaaaaacatattacaaataaaagaaaaatatcttattaatgaaatagaaattcttaaaaatgaattacgaagagtaaaagaagagataaatagagtaaaaagtgtaccattattaatgggacaatttttggaagcaattgataaaaatactgcaatagtaagttcaagtgcaggaactaatgctgttgtaaaaatattaagtacagttgataaggagttactagttccaaatacaagtgtagcacttcataggcattcatcagctatagttgatgttttaccacccgaagcagattctacaattccaacagttggtgaggaagaaaaaccaaatattacatatgatgatattggtggaatggatatacaaaagcaagaaattaaagaatgcgtggaattacctttactacaatttgaaaaatataaagcaattggaattgacccaccacgtggagtattattatatggacctcctggaacaggtaaaactatgctggtaaaagcagttgccaatcatacaaaagctacatttataaaagtaaatggatccgaatttatacaaaaatatttaggtgaaggtccacgcatggtaagagatgtgtttagattagcaaaagaaaaagcaccgtcaattatttttattgatgaagttgattcaattgcaacaaaaagatttgatgcttcaacatcagctgatagagaagttcaacgagttttaattgaattattaaatcaaatggatggatttgatcaaactttaaatgttaaggttattatggctactaatagagcagattctattgatccagctctattacgaccaggtagattagatagaaaaatagaatttccatatccagataaaagacaaaaacgtctagtatttacaacaataacaaataaaatgacattatctgatgatgttgatcttgaagaatttattaatagaccagatcaattaagttgtgctgatttaaattcaatttgtcaagaagcaggaatgttagctgtacgaaattcaagacatatgataattcaaaaagattttgaaaatgcatactcaaaagttatagatagaaaagaatcaaaattaccattatattcataa

SEQ ID NO: 5785 - protein, 384 aa, Enterocytozoon bieneusi (strain H348)
MTNIVDYCTFKKTEKIKNILQIKEKYLINEIEILKNELRRVKEEINRVKSVPLLMGQFLEAIDKNTAIVSSSAGTNAVVKILSTVDKELLVPNTSVALHRHSSAIVDVLPPEADSTIPTVGEEEKPNITYDDIGGMDIQKQEIKECVELPLLQFEKYKAIGIDPPRGVLLYGPPGTGKTMLVKAVANHTKATFIKVNGSEFIQKYLGEGPRMVRDVFRLAKEKAPSIIFIDEVDSIATKRFDASTSADREVQRVLIELLNQMDGFDQTLNVKVIMATNRADSIDPALLRPGRLDRKIEFPYPDKRQKRLVFTTITNKMTLSDDVDLEEFINRPDQLSCADLNSICQEAGMLAVRNSRHMIIQKDFENAYSKVIDRKESKLPLYS

SEQ ID NO: 5786 - DNA, 1383 bp, Oryza sativa subsp. indica
  CDS (1)..(1383)
atggggcagggcactcccggcgggatggggaagcagggcggcctccccggcgatcgcaagccgggcgacggtggcgccggcgacaagaaggaccgcaagttcgagccccccgccgcgccgtcccgcgtcggccggaagcagcggaagcagaaggggcccgaggcggaggcgcgcctgcccgccgtggcgccgatctccaaccaggagcggctgcgacccagcgaggacaagacggaggaggaccgatccaaggtcgatgacctccggggcacccccatgagcgttggctcgcttgaggagatcatcgatgagagccacgccatcgtctcgtcgtccgtcgggccggaatactatgttggcatattatcattcgtcgacaaggaccagctcgagccagggtgtgccattctgatgcataacaagtgggattggaagcaccacactaacacatcagtagttcatggtttggtgattgggtcgaaaaggcaatcagatcagatggtgcacattcggtacctgcaaatggttctctctgtggttggaattttgcaagatgaggttgaccctatggtttctgtcatgaaagttgaaaaggcacctttggagtcttatgcggacatcggtggtctggatgcccaaattcaagagattaaagaggctgttgagcttcccttgactcatcctgagctatatgaggacattggaataaggcctcccaagggagtaatattatatggggaacctggcacaggcaaaactctacttgcaaaggcggttgctaattctacatcagcaacatttttgcgtgttgttgggagtgagttgatccaaaagtaccttggtgatggccccaagcttgtaagagaattgtttagggtggctgatgatctttctccgtcaattgtctttattgacgagattgatgcagtcggaacaaagaggtatgatgctcattcgggtggagagcgtgaaattcagagaaccatgttggagttgcttaatcagctggatggttttgattcaaggggagatgttaaagttattttagcaacaaatcgcattgaaagtcttgacccagctttgcttcgacctggtcggatagacagaaagattgaatttccgttaccagatattaaaaccaggaggcggatcttccagatacacacatctaagatgacattggcagatgatgttaacctagaagagtttgtgatgaccaaggatgagttttctggtgctgacatcaaagcaatatgtacggaggctggattgctcgctttaagggagcgcagaatgaaggtgacacatgccgatttcaagaaggccaaagagaaggtcatgttcaagaagaaggaaggtgtaccggaagggctttatatgtga

SEQ ID NO: 5787 - protein, 460 aa, Oryza sativa subsp. indica
MGQGTPGGMGKQGGLPGDRKPGDGGAGDKKDRKFEPPAAPSRVGRKQRKQKGPEAEARLPAVAPISNQERLRPSEDKTEEDRSKVDDLRGTPMSVGSLEEIIDESHAIVSSSVGPEYYVGILSFVDKDQLEPGCAILMHNKWDWKHHTNTSVVHGLVIGSKRQSDQMVHIRYLQMVLSVVGILQDEVDPMVSVMKVEKAPLESYADIGGLDAQIQEIKEAVELPLTHPELYEDIGIRPPKGVILYGEPGTGKTLLAKAVANSTSATFLRVVGSELIQKYLGDGPKLVRELFRVADDLSPSIVFIDEIDAVGTKRYDAHSGGEREIQRTMLELLNQLDGFDSRGDVKVILATNRIESLDPALLRPGRIDRKIEFPLPDIKTRRRIFQIHTSKMTLADDVNLEEFVMTKDEFSGADIKAICTEAGLLALRERRMKVTHADFKKAKEKVMFKKKEGVPEGLYM

SEQ ID NO: 5788 - DNA, 1266 bp, Talaromyces stipitatus (strain ATCC 10500 / CBS 375.48 / QM 6759 / NRRL 1006)
  CDS (1)..(1266)
atggctgacgtcgccgtcgagaatcccgtcaacagcgtggcaattcacaagcgccctgcaccagcagattcagtacctatcatagattcattagagggcggtagcgatagcggtgatgaatatgctactttgaaacgtcttcaaagacatttagagtacattcaccttcaagaggagtacatcaaagacgagcaaaggagtttaaaaagagaactagttcgagctcaagaagagatcaaacggatacaaagtgttcctctggttatcggccagttcatggaagccatcgatcaaaataccggaattgtacaatcgtcgaccggttccaactatgtcgtccgcattctttccacccttgaccgagagaagttgaagccgtcgtcatctgttgccttgcacaggcactcaaactcgctcgttgatattctcccacccgaagcggattcgtctattgcgatgctaggtgcgcatgagaagccggatgttacgtatgccgatgttggtggtttggatatgcagaaacaagagatcagggaagccgtggaattgccgctcactcatacggatctctatcaacagattggtattgatcctcctcgtggtgtattgctctatggtccccctggtaccggaaagaccatgttggtcaaggccgtggccaacagtaccacagccagtttcattcgtgtcgtcggctcagagttcgttcagaaatacttgggtgaaggacctcgcatggtccgcgacgtcttccgtatggcccgcgaaaactcaccagccattattttcattgatgagatcgacgccattgccaccaagcgttttgatgcacaaacaggagccgatcgtgaggtgcagcgtattctcctagaacttctcaaccagatggacggtttcgatcaaggtagcaacgtcaaggttattatggccaccaaccgagcagataccctagatcccgccttgctgcgaccaggtcgtcttgatcgcaagattgaatttccttctctccgggaccgccgtgagcgtcgcctgatcttcacgactattgcatccaaaatgtctctctcgcccgaggtggatttggattccttgattgtgcgaaacgaacccctatctggcgctgttattgccgctatcatgcaagaagctggtctacgtgctgtccgcaagaaccgttacaacatcatccaatctgatctagaggatgcatactccagccaagtcaagactagccaagaagctgataagtttgatttctacaagtaa

SEQ ID NO: 5789 - protein, 421 aa, Talaromyces stipitatus (strain ATCC 10500 / CBS 375.48 / QM 6759 / NRRL 1006)
MADVAVENPVNSVAIHKRPAPADSVPIIDSLEGGSDSGDEYATLKRLQRHLEYIHLQEEYIKDEQRSLKRELVRAQEEIKRIQSVPLVIGQFMEAIDQNTGIVQSSTGSNYVVRILSTLDREKLKPSSSVALHRHSNSLVDILPPEADSSIAMLGAHEKPDVTYADVGGLDMQKQEIREAVELPLTHTDLYQQIGIDPPRGVLLYGPPGTGKTMLVKAVANSTTASFIRVVGSEFVQKYLGEGPRMVRDVFRMARENSPAIIFIDEIDAIATKRFDAQTGADREVQRILLELLNQMDGFDQGSNVKVIMATNRADTLDPALLRPGRLDRKIEFPSLRDRRERRLIFTTIASKMSLSPEVDLDSLIVRNEPLSGAVIAAIMQEAGLRAVRKNRYNIIQSDLEDAYSSQVKTSQEADKFDFYK

SEQ ID NO: 5790 - DNA, 1170 bp, Talaromyces stipitatus (strain ATCC 10500 / CBS 375.48 / QM 6759 / NRRL 1006)
  CDS (1)..(1170)
atggcgttggacaactactatcgcaacaaaatcgagagcatgaagctcgagattatacagggccaagccgtactacgaagattagaagctcaacgaaatgattacaactccagagtccgtcttttgagggaagaacttgggttgctacaacaacctggatcctatgttggtgaggtggttaaggtgatgggcaccaagaaggtgcttgtcaaggtccatccagaggggaaatacgttgtcgacatcgccgataacgtggatgtttctaaactcaccgtcggcaagcgtgtttccttactttccgatacatataagcttgaaaagatgcttccgtcgtccgttgatcctctcgtctcgctgatgatggtggaaaaggttccagacagtacttacgatatgatcggtgggctggaccaacaaatcaaggaaatcaaggaagtcatcgagcttggattgaaacacccagaacttttcgagtcgctcggtattgctcaacccaagggagtgcttctctatggaccacctggtacgggaaagacgctactggcacgagcagttgctcaccacgcagactgcaagttcattcgggttagtggatcggaattggtacaaaagtatattggggagggaagtcgaatggtgcgagaattgtttgtgatggccagagagcatgctcccagtatcatcttcatggatgagattgatagtatcggatctagtcgagttgagggtagcagtggtggtgattccgaggtacagcgaacgatgctggaactcttgaaccagcttgatggattcgagcccaccaagaacatcaaggttattatggcaacgaaccgattggatatcctcgatcctgcccttctgcgacctggacgtattgaccgaaagattgaattcccacctccaactgtggaagctcgagcggacattctacgtattcattcccgatccatgaacctgacgcgcggtatcaacctgacaaagattgctgagaagatgaacggatgctccggagctgagttgaagggagtctgcaccgaggcgggcatgtatgctctacgagagcgacgagtgcatgtgactcaggaggactttgacctggcgacggccaagattctgaacaagcacgacgacaaggaggtgagtctgggcaaggtctggaaatag

SEQ ID NO: 5791 - protein, 389 aa, Talaromyces stipitatus (strain ATCC 10500 / CBS 375.48 / QM 6759 / NRRL 1006)
MALDNYYRNKIESMKLEIIQGQAVLRRLEAQRNDYNSRVRLLREELGLLQQPGSYVGEVVKVMGTKKVLVKVHPEGKYVVDIADNVDVSKLTVGKRVSLLSDTYKLEKMLPSSVDPLVSLMMVEKVPDSTYDMIGGLDQQIKEIKEVIELGLKHPELFESLGIAQPKGVLLYGPPGTGKTLLARAVAHHADCKFIRVSGSELVQKYIGEGSRMVRELFVMAREHAPSIIFMDEIDSIGSSRVEGSSGGDSEVQRTMLELLNQLDGFEPTKNIKVIMATNRLDILDPALLRPGRIDRKIEFPPPTVEARADILRIHSRSMNLTRGINLTKIAEKMNGCSGAELKGVCTEAGMYALRERRVHVTQEDFDLATAKILNKHDDKEVSLGKVWK

SEQ ID NO: 5792 - DNA, 1389 bp, Talaromyces stipitatus (strain ATCC 10500 / CBS 375.48 / QM 6759 / NRRL 1006)
  CDS (1)..(1389)
atgggtaatcaacaatccaatatcgggggcggtggcccaggaggagatggaaacgatgacaagagcaagaaggataagcctaagtacgaaccaccaccacaacccaccactcgcctcggtcgcaagaagagaaaggcagctggtccaaatgccgccgccaaacttcccactattcttcccacggcacgatgtaaattgcgatatttgaggatgcaacgaatccacgatcatctgttacttgaggaggagtatgtcgagaaccaggagcgtatccgaaaggcgaaagcacaggctaccacccaaccttcagcaactggagatctcgatgctttggatcgaaatgctgatgaaagaggtcgggtggatgacatgcgagggagtccaatgggtgttggaaatctggaggaaatgattgatgacgaccacgccatcgtatccagtgccactggtcctgagtactacgtttctatcatgtcttttgtcgacaaagatttgttggagcctggtgctagtattcttttacatcacaagtcggtgtcagtggttggtgtgttgacagacgacacggatccattggtgtccgtcatgaagctagacaaagcgccgacagagtcttatgcggatatcggtggtctcgagtctcagattcaagaggttcgggaagccgtcgagttgccgttgttacacccggaactttacgaagaaatgggtatcaagccccccaaaggtgttattctgtacggtagcccgggtactggaaagacgcttttggcgaaggccgtggcaaaccagaccagcgctactttcctgcgtatcgttggtagtgaattgatccagaaatatctgggtgacggccctcgactcgtacgacagattttccaggtggcagcagagcatgctccatctattgtttttattgacgagatcgacgccatcggcacaaagcgatacgactctacctctggtggtgaacgagaaattcagagaacaatgttggaactgttgaaccagcttgatggattcgacgaccggggagatgttaaggtgattatggcaaccaacaagattgaaagcttggatccggccttgattcgcccaggtcgtatcgaccgcaagattttgttcgaaaatcctgaccaaaacaccaaacgcaaaatcttcctcctccacaccggcaaaatgtctctcagcgacgacgtcgatctggaagaattcatcagccaaaaggacgatctctccggtgccgatattaaagccatctgctccgaagccggtctcatggctcttcgcgagcgtcgtatgagggttcaaatggaggatttcagaactgcgcgtgaacgtgtcctcaaaaccaagaatgagagtgagccggagggattgtacttgtaa

SEQ ID NO: 5793 - protein, 462 aa, Talaromyces stipitatus (strain ATCC 10500 / CBS 375.48 / QM 6759 / NRRL 1006)
MGNQQSNIGGGGPGGDGNDDKSKKDKPKYEPPPQPTTRLGRKKRKAAGPNAAAKLPTILPTARCKLRYLRMQRIHDHLLLEEEYVENQERIRKAKAQATTQPSATGDLDALDRNADERGRVDDMRGSPMGVGNLEEMIDDDHAIVSSATGPEYYVSIMSFVDKDLLEPGASILLHHKSVSVVGVLTDDTDPLVSVMKLDKAPTESYADIGGLESQIQEVREAVELPLLHPELYEEMGIKPPKGVILYGSPGTGKTLLAKAVANQTSATFLRIVGSELIQKYLGDGPRLVRQIFQVAAEHAPSIVFIDEIDAIGTKRYDSTSGGEREIQRTMLELLNQLDGFDDRGDVKVIMATNKIESLDPALIRPGRIDRKILFENPDQNTKRKIFLLHTGKMSLSDDVDLEEFISQKDDLSGADIKAICSEAGLMALRERRMRVQMEDFRTARERVLKTKNESEPEGLYL

SEQ ID NO: 5794 - DNA, 1383 bp, Oryza sativa subsp. japonica
  CDS (1)..(1383)
atggggcagggcactcccggcgggatggggaagcagggcggcctccccggcgatcgcaagccgggcgacggcggcgccggcgacaagaaggaccgcaagttcgagccccccgccgcgccgtcccgcgtcggccggaagcagcggaagcagaaggggcccgaggcggcggcgcgcctgcccgccgtggcgccgctcttcaaccaggagcggctgcgacccagcgaggacaagacggaggaggaccgatccaaggtcgatgacctccggggcacccccatgagcgttggctcgcttgaggagatcatcgatgagagccacgccatcgtctcgtcgtccgtcgggccggaatactatgttggcatattatcattcgtcgacaaggaccagctcgagccagggtgtgccattctgatgcataacaagtgggattggaagcaccacactaacacatcagtagttcatggtttggtgattgggtcgaaaaggcaatcagatcagatggtgcacattcggtacctgcaaatggttctctctgtggttggaattttgcaagatgaggttgaccctatggtttctgtcatgaaagttgaaaaggcacctttggagtcttatgcggacatcggtggtctggatgcccaaattcaagagattaaagaggctgttgagcttcccttgactcatcctgagctatatgaggacattggaataaggcctcccaagggagtaatattatatggggaacctggcacaggcaaaactctacttgcaaaggcggttgctaattctacatcagcaacatttttgcgtgttgttgggagtgagttgatccaaaagtaccttggtgatggccccaagcttgtaagagaattgtttagggtggctgatgatctttctccgtcaattgtctttattgacgagattgatgcagtcggaacaaagaggtatgatgctcattcgggtggagagcgtgaaattcagagaaccatgttggagttgcttaatcagctggatggttttgattcaaggggagatgttaaagttattttagcaacaaatcgcattgaaagtcttgacccagctttgcttcgacctggtcggatagacagaaagattgaatttccgttaccagatattaaaaccaggaggcggatcttccagatacacacatctaagatgacattggcagatgatgttaacctagaagagtttgtgatgaccaaggatgagttttctggtgctgacatcaaagcaatatgtacggaggccggattgctcgctttaagggagcgcagaatgaaggtgacacatgccgatttcaagaaggccaaagagaaggtcatgttcaagaagaaggaaggtgtaccggaagggctttatatgtga

SEQ ID NO: 5795 - protein, 460 aa, Oryza sativa subsp. japonica
MGQGTPGGMGKQGGLPGDRKPGDGGAGDKKDRKFEPPAAPSRVGRKQRKQKGPEAAARLPAVAPLFNQERLRPSEDKTEEDRSKVDDLRGTPMSVGSLEEIIDESHAIVSSSVGPEYYVGILSFVDKDQLEPGCAILMHNKWDWKHHTNTSVVHGLVIGSKRQSDQMVHIRYLQMVLSVVGILQDEVDPMVSVMKVEKAPLESYADIGGLDAQIQEIKEAVELPLTHPELYEDIGIRPPKGVILYGEPGTGKTLLAKAVANSTSATFLRVVGSELIQKYLGDGPKLVRELFRVADDLSPSIVFIDEIDAVGTKRYDAHSGGEREIQRTMLELLNQLDGFDSRGDVKVILATNRIESLDPALLRPGRIDRKIEFPLPDIKTRRRIFQIHTSKMTLADDVNLEEFVMTKDEFSGADIKAICTEAGLLALRERRMKVTHADFKKAKEKVMFKKKEGVPEGLYM

SEQ ID NO: 5796 - DNA, 1332 bp, Ricinus communis
  CDS (1)..(1332)
atgggtcaaggtccatcgggaatgaaccggccaccaggcgacagaaagaacgattccgacaacaaaaaggacaaaaaatacgaaccagcagcaccaccatcacgcgtaggccgaaagcagcgcaaacaaaaaggtccggaggcggccgcgcggctcccaacagtaacaccactaactaaatgcaaacttcggctcttaaaactggagcgcattaaagactatctgttaatggaggaggagtttgtagccaatcaagaaaggcttaaaccacaggaggaaaagaatgaagaggacagatctaaggtcgatgatttgagaggctcgcctatgagtgttggcaatttggaagagctgattgatgagaatcatgccatcgtttcttcttcggtgggacccgagtattatgttgggattttgtcttttgttgataaggatcaacttgaacctggatgtgctattcttatgcataataaggtcctttctgttgttgggcttcttcaggatgaagttgatcctatggtttctgtgatgaaggttgagaaagctcctctggaatcttatgccgacattggtgggttggatgcccaaatacaggaaattaaagaagcagtggaacttccgcttactcatcctgaattgtatgaagatattggtattaaaccccctaaaggagtgatactctatggggagcctggaacagggaaaacattgcttgctaaggcagtggcaaactctacatcagcaactttcttgcgtgtagtaggaagtgaattgattcagaaatacttgggagatggcccaaaattagtcagggaactctttagagttgctgatgatctttcaccatcaattgttttcatcgatgaaattgatgcagttggtacaaagaggtatgatgcacattcaggtggtgaacgtgagatccaaagaactatgttagagttgctgaatcaactagatggttttgattcaagaggagatgtaaaagtaatccttgcaacaaacagaattgaaagtcttgatccggccttgttgcgccccggacgaatagacagaaagattgaatttccccttccagatatcaaaaccaggaggcgcattttccagatacatacatcaagaatgacattggcagatgatgttaacttagaagaattcgtaatgactaaggatgaattttctggggctgatatcaaagctatatgtacagaggctggcctgcttgctctaagagagcggcgcatgaaggtaacccatgcagattttaagaaagcgaaggagaaagttatgttcaagaagaaagaaggggtgccggaaggactctatatgtga

SEQ ID NO: 5797 - protein, 443 aa, Ricinus communis
MGQGPSGMNRPPGDRKNDSDNKKDKKYEPAAPPSRVGRKQRKQKGPEAAARLPTVTPLTKCKLRLLKLERIKDYLLMEEEFVANQERLKPQEEKNEEDRSKVDDLRGSPMSVGNLEELIDENHAIVSSSVGPEYYVGILSFVDKDQLEPGCAILMHNKVLSVVGLLQDEVDPMVSVMKVEKAPLESYADIGGLDAQIQEIKEAVELPLTHPELYEDIGIKPPKGVILYGEPGTGKTLLAKAVANSTSATFLRVVGSELIQKYLGDGPKLVRELFRVADDLSPSIVFIDEIDAVGTKRYDAHSGGEREIQRTMLELLNQLDGFDSRGDVKVILATNRIESLDPALLRPGRIDRKIEFPLPDIKTRRRIFQIHTSRMTLADDVNLEEFVMTKDEFSGADIKAICTEAGLLALRERRMKVTHADFKKAKEKVMFKKKEGVPEGLYM

SEQ ID NO: 5798 - DNA, 1392 bp, Candida dubliniensis (strain CD36 / CBS 7987 / NCPF 3949 / NRRL Y-17841)
  CDS (1)..(1392): transl_table=12
atgtgtgtgtgtgtgattggtttttctggcctctctctattattctctcactcgaatttcacacacgacccgaaaaaaaaaaaaaaaaaggtcagaacttcaatctcaaaaagtggcaaactcaaaaaattctttcctttttcccaatcacgagtacaagatctaatcattcatcatcatcaagaaatgactacttcaattgataaaccttacgttcatgaaggtggtataagaccatattttgaacaacaaatacaagatacggaaataagaatacagcaaaccacacagaacttgcgtcgtttggaagcccaacgtaacaaattgaataacaaagtgagacaattaaaggatgaattaagattgttgcaagaacctggatcatatgtaggagaagttgttaaagttatgggtttgaaaaaagtcttggttaaaattcatcctgaaggtaaattcattgtgaatgttacaaaagatatcgatgtcaagaaattgaccccatcaataagagtgtgtttgaaagcagattctcacgatttgtacaaaatattacccaataaaattgatcctttggtctcattgatgatggttgaaaaagtccctgactcaacatacgatatggttggtgggttagataaacaaatcaaagaaatcaaagaagttattgaattgcctgtcaagcatccagaattgtttgagagtttgggtatagctcaacctaagggtgttatattgtatggtccaccaggtacaggtaagaccttgttggcaagagccgttgcccaccacaccgaatgtaaattcattcgtgtttccggttcagaattggtacaaaagtatattggtgaagggtctcgtatggttagggaattgttcgtgatggcaagagaacatgcgccatcgattatttttatggatgaaattgattctattgggtcatcacgtgttgaaggctcatcgggtggtgattctgaagtgcaaagaacaatgttggaattgttaaaccaattggatgggtttgagagttcaaaagacatcaagatcattatggccactaatcgtttagatattttggacccagcgttattgagaccaggtagaattgatagaaagattgaatttcctgctccaaccgttgctgctagaacagatattttgaagattcattccagatctatgaatttgacaagaggtattaatttgcgtaaaatcgctgaaaaaatgaatgggtgtagtggtgctgatgtgaaaggggtttgtactgaagctggtatgtatgcattaagagaaagaagaattcatgtaactcaagaagattttgaattggcagttgcaaaggttatgtccaagaatgacgatggtgctgtctccttacagaaattattcaagtaa

SEQ ID NO: 5799 - protein, 463 aa, Candida dubliniensis (strain CD36 / CBS 7987 / NCPF 3949 / NRRL Y-17841)
MCVCVIGFSGLSLLFSHSNFTHDPKKKKKKVRTSISKSGKLKKFFPFSQSRVQDLIIHHHQEMTTSIDKPYVHEGGIRPYFEQQIQDTEIRIQQTTQNLRRLEAQRNKLNNKVRQLKDELRLLQEPGSYVGEVVKVMGLKKVLVKIHPEGKFIVNVTKDIDVKKLTPSIRVCLKADSHDLYKILPNKIDPLVSLMMVEKVPDSTYDMVGGLDKQIKEIKEVIELPVKHPELFESLGIAQPKGVILYGPPGTGKTLLARAVAHHTECKFIRVSGSELVQKYIGEGSRMVRELFVMAREHAPSIIFMDEIDSIGSSRVEGSSGGDSEVQRTMLELLNQLDGFESSKDIKIIMATNRLDILDPALLRPGRIDRKIEFPAPTVAARTDILKIHSRSMNLTRGINLRKIAEKMNGCSGADVKGVCTEAGMYALRERRIHVTQEDFELAVAKVMSKNDDGAVSLQKLFK

SEQ ID NO: 5800 - DNA, 1326 bp, Candida dubliniensis (strain CD36 / CBS 7987 / NCPF 3949 / NRRL Y-17841)
  CDS (1)..(1326): transl_table=12
atgggtcaaggtccttcaggaatgccaggtggcgataaccttaacaagaggaaagatgataagaaaaaagaaaaaccaaagtacgaaccaccagtagaatcaaagtttggtaaaaagaaaagaagaggccctgatatggcagttaaattacccagtgtctaccccaacacaagatgcaaattgaaattattaaagttagaaagaatcaaagaccatttgttgttggaagaagagtttgttaccaaccaagaagcattccaacctacagaggcaagacaagcagaagaaagagaaaaagtcgacgaattgagaggatatccgatggcaattgggactttagaagaaataatcgacgatgatcatgcaattgtgtctagtactgctagttcagaatactatgtgtcaatcatgtcgtttgtagacaaggggttattagaacctgggtgttcggttcttttacatcataaaacagtggcagtggtaggagtattacaggatgatgctgatcctatggtttcagtaatgaaactcgataaatcccctacagaatcgtatgctgacattggagggttggaatctcaaattcaagaaatcaaagaagctgttgaattgccattgacacatcctgaattgtacgaagaaatgggaatcaagcctccgaaaggggtgatattatatggtgctccaggtactggtaaaaccttgttggccaaagcagttgcaaatcaaacaagtgccacttttttgagaattgtcggatcggagttgatccagaaatacctaggcgatggtccaaggttgtgtcgtcaaattttccaaattgctgctgatcatgcaccttcgattgtttttattgatgaaatcgacgccattggtacaaagagatacgagtctacttctggtggtgaacgtgagatccagagaaccatgttggagttattgaatcaattggacgggtttgatgatagaggtgacatcaaagttattatggctacaaataagatagagtcgcttgaccctgcattaatcagaccaggaagaatcgatagaaagattttatttgagaaccctgacgctaacacaaagaagaagattttgaccatccatacttcaaagatgagtttggcagatgacgttaacttggatgaaatagtcactggtaaagatgacttgtctggtgctgatataaaagctatatgtacagaagctgggttattagcattaagagaaagacgtatgcaagtcaaagctgaagattttaagtcggcaaaggaaagagtattgaaaaacaaggtcgaagagaatcttgaaggtttgtatttgtaa

SEQ ID NO: 5801 - protein, 441 aa, Candida dubliniensis (strain CD36 / CBS 7987 / NCPF 3949 / NRRL Y-17841)
MGQGPSGMPGGDNLNKRKDDKKKEKPKYEPPVESKFGKKKRRGPDMAVKLPSVYPNTRCKLKLLKLERIKDHLLLEEEFVTNQEAFQPTEARQAEEREKVDELRGYPMAIGTLEEIIDDDHAIVSSTASSEYYVSIMSFVDKGLLEPGCSVLLHHKTVAVVGVLQDDADPMVSVMKLDKSPTESYADIGGLESQIQEIKEAVELPLTHPELYEEMGIKPPKGVILYGAPGTGKTLLAKAVANQTSATFLRIVGSELIQKYLGDGPRLCRQIFQIAADHAPSIVFIDEIDAIGTKRYESTSGGEREIQRTMLELLNQLDGFDDRGDIKVIMATNKIESLDPALIRPGRIDRKILFENPDANTKKKILTIHTSKMSLADDVNLDEIVTGKDDLSGADIKAICTEAGLLALRERRMQVKAEDFKSAKERVLKNKVEENLEGLYL

SEQ ID NO: 5802 - DNA, 1218 bp, Natrialba magadii ATCC 43099
  CDS (1)..(1218): transl_table=11
atgactgacactgtggacgacgtcgacctcccatatgacgaggacgaggcgtcccaacaggagaaaatccaggcactcgaggacaagctggagatcctcgagtcgcaaaacgaggagatgcgagacaagctcctcgatgcgaacgccgagaacaacaagtaccagcagaagcttgagcggctcacgcacgagaacaagaagctaaagcagtccccgctgttcgtcgccaccgtccaagagatgaccgacgagggcgtcatcatcaaacagcacgggaacaaccaggaagcgctgaccgaagtcaccgacgagatgcgcgaggagatcgaacccgacgcccgggttgccgtcaacaactccctctctatcgtcaagacgctctctagcgagacggacgtccgggcccgtgtgatggaagtcaccgagagtcccgaggtcagctacgaggatatcggcggtctggaagagcagatgcaggaagttcgcgagaccgtcgagatgccactcgagaagccggagatgttcgacgatgtcggcatcgacccgccgagtggggtcctgctgtacggtccgccgggcacggggaagacgatgctcgcgaaggctgtcgccaaccagaccaacgcgactttcatcaagatggccggctccgagctggtccacaagttcatcggtgagggtgcgaagctggtccgtgacctgttcaaggtcgcccgcgaacacgagccagccgtcatcttcatcgacgaaatcgacgccatcgcggccaagcggacggagtcgaagacctccggcgacgccgaggtccagcggacgatgatgcaactcctgagcgaaatggacggcttcgaagaccgcggcgagatccggatcatcgccgccaccaaccgcttcgacatgttagaccgtgcgattcttcgccccggtcgcttcgaccgtctcatcgaggtccccaagccgaaccaggagggtcgcgagatcatcttcgagatccacacccgcggcatgaacgtcgccgacgatgtcgacttcgccgaactggctaccgaagccgaggaggcctccggtgccgacgtgaaggcgatctgtaccgaagccgggatgttcgccatccgcgacgagcgcaccgagatccagatggaagacttcctgggcgcgtgggagaaggttcaggccgaatccgacgagacccaagaggtctcgaagacgttcgcctga

SEQ ID NO: 5803 - protein, 405 aa, Natrialba magadii ATCC 43099
MTDTVDDVDLPYDEDEASQQEKIQALEDKLEILESQNEEMRDKLLDANAENNKYQQKLERLTHENKKLKQSPLFVATVQEMTDEGVIIKQHGNNQEALTEVTDEMREEIEPDARVAVNNSLSIVKTLSSETDVRARVMEVTESPEVSYEDIGGLEEQMQEVRETVEMPLEKPEMFDDVGIDPPSGVLLYGPPGTGKTMLAKAVANQTNATFIKMAGSELVHKFIGEGAKLVRDLFKVAREHEPAVIFIDEIDAIAAKRTESKTSGDAEVQRTMMQLLSEMDGFEDRGEIRIIAATNRFDMLDRAILRPGRFDRLIEVPKPNQEGREIIFEIHTRGMNVADDVDFAELATEAEEASGADVKAICTEAGMFAIRDERTEIQMEDFLGAWEKVQAESDETQEVSKTFA

SEQ ID NO: 5804 - DNA, 1524 bp, Caligus rogercresseyi
  CDS (21)..(1343)
ggggagagagacacgcaacaatgggtcaaagccaaagtgggggccatggacctggtggaggcaagaaggatgacaaggacaagaagaagaagtatgagcctcccatccccaccagagttgggaagaggaagaagaagagcaagggaccagatgcggccagcaagctacctttagtcacccctcacacccactgccgtctgaagctgctgaagcaggagaggatcaaagactacctgctgatggaggaggagttcatcaggaaccaggagcagatgaaaccgctggaggaaaaacaggaagaggagaggtccaaggtggatgacctgaggggaacacccatgtctgtggggaacctggaggagatcatcgatgacaaccatgccatcgtgtctacgtcagtagggtcagagcactatgtcagcatcctctccttcgtagacaaagacctgctggaacccggctgctctgtactgctcaaccacaaggtccatgctgtgattggtgtcctgatggacgacactgatcccctggtcacagtgatgaaggtggagaaggcccctcaggagacctacgctgacataggaggtctagacagccagatccaggagatcaaggagtccgtggagctgcctctcacccaccctgagtactatgaggagatgggcatcaagcctcctaaaggagtcatcctctatggagcacctggcactggtaagaccctgctgaccaaggcggtggccaaccagacgtcagctacgttcctgcgtgtggtgggctctgagctgattcagaagtacctgggggacgggcccaagctggtcagagagctgttcagggtggcagaggaacacgcaccatccatcgtcttcatcgatgagatagacgccatcggcactaaaagatatgactctaactctggaggagaacgggagattcagaggactttgctggagcttctcaaccagctggatggttttgactctagaggagatgtgaaggtgatcatggccaccaacaggatagagactctggaccctgccctcatcaggcctgggcgtattgacaggaagatagagttccctctgcctgatgagaagaccaagcggaggatcttcaacatccacaccagcaggatgaccgtagcagacgacgtcaccctggacgacctgattttagctaaagatgacctatcaggagctgacatcaaggccatctgtactgaggctggcctcatggccctgagagagcgcaggatgaaggtcaccaacgaagacttcaagaagtccaaggagaatgtgctgtacaagaaacaggagggcacaccggagggcctgtacctctaacctataacctttgacctataacccctgacctttccgcagtgtgaaagagaggagtctggctgtctcctcacagaacggagttttgatataatttgttgcatgttacgttggactcaacactcccactgtctacctttatgtgctatgatatgacagacaataaatacaagaatttgaatgg

SEQ ID NO: 5805 - protein, 440 aa, Caligus rogercresseyi
MGQSQSGGHGPGGGKKDDKDKKKKYEPPIPTRVGKRKKKSKGPDAASKLPLVTPHTHCRLKLLKQERIKDYLLMEEEFIRNQEQMKPLEEKQEEERSKVDDLRGTPMSVGNLEEIIDDNHAIVSTSVGSEHYVSILSFVDKDLLEPGCSVLLNHKVHAVIGVLMDDTDPLVTVMKVEKAPQETYADIGGLDSQIQEIKESVELPLTHPEYYEEMGIKPPKGVILYGAPGTGKTLLTKAVANQTSATFLRVVGSELIQKYLGDGPKLVRELFRVAEEHAPSIVFIDEIDAIGTKRYDSNSGGEREIQRTLLELLNQLDGFDSRGDVKVIMATNRIETLDPALIRPGRIDRKIEFPLPDEKTKRRIFNIHTSRMTVADDVTLDDLILAKDDLSGADIKAICTEAGLMALRERRMKVTNEDFKKSKENVLYKKQEGTPEGLYL

SEQ ID NO: 5806 - DNA, 1317 bp, Lepeophtheirus salmonis (salmon louse)
  CDS (1)..(1317)
atgggaaatcaacagtccggaagtggtggaggagacaagaagggggagaagacggagcggaagaagtatgagcctcccgtgcccacccgagtagggaagaagcgtaagcgtgcccgtggtcctgatgcggccaacaaattgcctctggtgactccacacacgaaatgtcggctcaagttgctgaaattggagcgtatcaaggactacctgctcatggaggaggagtttattcgtaatcaggaggtgctgaagccccaagaggagaagaatgaggaggagcgctccaaggtggacgatcttcgtggcacccccatgtctgtgggctccttggaggagataattgacgacaaccacgccatcgtgtccacctccgtgggctctgagcactacgtgtccatcctgtcctttgtagacaaggatcagctggagccgggatgctccgtcttgctcaatcatcgtgtgcatgccgtcgtgggcgttctcggggatgacacggaccccatggtcaccgtcatgaagctggaaaaggcacctcaagaaacatatgcagacattggtggactcgaccaacaaatacaggaaatcaaggagtctgtggaactccctctcactcatccagaatactacgaggaaatgggcattaaaccacccaagggtgtcattctctacggacctccgggaacgggaaagactcttttagcaaaagctgtcgcaaatcaaacctctgctaccttccttcgagttgttggatcggaactcattcaaaaatatttgggggatggtcctaagctagttagagagttgttccgtgtagctgaggaacactctccttcgattgtattcatagatgaaattgatgccgtgggaacaaagcgctatgattccaactgtggaggcgaaagagaaatccaaaggactatgttggagcttctcaatcagttggatggatttgattccagaggagacgtcaaagtcattatggccacaaatcgtattgagtctcttgatccagctttaattcgtccaggccggattgatcgaaaaattgaattccccattcctgatgaaaaaactaagaaaagaatttttggaattcacactagtaaaatgactcttgcaagtgacgtaaatgtagaggaatatataatggccaaggatgatttatctggtgctgatattaaagctatttgcactgaggctggtcttatggctctcagagagcgacgaatgaaagttactgacgaagacttcaaaaaatccaaggaaaatgtcctatatcgcaaacaagaaggcactccagagggtctttatctttaa

SEQ ID NO: 5807 - protein, 438 aa, Lepeophtheirus salmonis (salmon louse)
MGNQQSGSGGGDKKGEKTERKKYEPPVPTRVGKKRKRARGPDAANKLPLVTPHTKCRLKLLKLERIKDYLLMEEEFIRNQEVLKPQEEKNEEERSKVDDLRGTPMSVGSLEEIIDDNHAIVSTSVGSEHYVSILSFVDKDQLEPGCSVLLNHRVHAVVGVLGDDTDPMVTVMKLEKAPQETYADIGGLDQQIQEIKESVELPLTHPEYYEEMGIKPPKGVILYGPPGTGKTLLAKAVANQTSATFLRVVGSELIQKYLGDGPKLVRELFRVAEEHSPSIVFIDEIDAVGTKRYDSNCGGEREIQRTMLELLNQLDGFDSRGDVKVIMATNRIESLDPALIRPGRIDRKIEFPIPDEKTKKRIFGIHTSKMTLASDVNVEEYIMAKDDLSGADIKAICTEAGLMALRERRMKVTDEDFKKSKENVLYRKQEGTPEGLYL

SEQ ID NO: 5808 - DNA, 1233 bp, Lepeophtheirus salmonis (salmon louse)
  CDS (1)..(1233)
atggaagagatcggaatagtgttggcggaggccccattggaagagattcccaagagcacgcctgaagagacgagcaacaatgacttggaggatctgtacacccgctacaagaagcttgagcaacagttagaatttctgcaggtccaagaggactacatcaaggatgagcaacggaatctgaagaaggagtacctgcacgcccaggaagaggtgaagcgcattcagtccgtgcccctggtgattggacagtttttggaagcggtggatcagaatacggggatcgtggggtccaccacgggctccaattactatgtgcggatcctctcgacgctggaccgggagctgctcaagcctgcagcctctgtggctttgcacaagcactcgaacgcactcgtggacgttcttcccccagaggcggattcttccatctccatgttgcaagcagatgagaagcccgatgtctcctacgcggatattggaggcatggacatgcaaaagcaagaaatgaaggaggctgtagaactcccactcactcacttcgatctctacaaacaaatcggaattgaccctcctcgaggagttctcatgtatggacctcctggctgtggaaaaactatgttggccaaggcagttgcacatcacactactgctgcttttatacgagttgtgggctcggagtttgtacagaaatatctgggagagggccctcgaatggtgagggatgtatttagactagctaaagaaaattctcctgccatcatttttatagacgaaattgatgccattgcaacaaagcgatttgatgctcagacaggtgctgaccgagaagtccaacgtattctcttagaattactcaatcaaatggatggcttcgatcaagcaaccaatgttaaagtcatcatggccacgaatcggcacgatactctagatcctgctctcttacgtcctggtcgtcttgatcgaaaaattgaattcccatttcccgaccggagacaaaaacgacttatctttgctactattgctggaaaaatgaactcttctgacgaagtagatttagaagattttgttgcgcgacctgataagatctcaggtgcagatatcaacgctatttgtcaagaggcaggcatgcaagcaatccgtgaaaatcgttacatcgtccttcccaaagattttgaaaaaggctacaagaataacattaagaaaacagagaatgaatacgaattctacaaataa

SEQ ID NO: 5809 - protein, 410 aa, Lepeophtheirus salmonis (salmon louse)
MEEIGIVLAEAPLEEIPKSTPEETSNNDLEDLYTRYKKLEQQLEFLQVQEDYIKDEQRNLKKEYLHAQEEVKRIQSVPLVIGQFLEAVDQNTGIVGSTTGSNYYVRILSTLDRELLKPAASVALHKHSNALVDVLPPEADSSISMLQADEKPDVSYADIGGMDMQKQEMKEAVELPLTHFDLYKQIGIDPPRGVLMYGPPGCGKTMLAKAVAHHTTAAFIRVVGSEFVQKYLGEGPRMVRDVFRLAKENSPAIIFIDEIDAIATKRFDAQTGADREVQRILLELLNQMDGFDQATNVKVIMATNRHDTLDPALLRPGRLDRKIEFPFPDRRQKRLIFATIAGKMNSSDEVDLEDFVARPDKISGADINAICQEAGMQAIRENRYIVLPKDFEKGYKNNIKKTENEYEFYK

SEQ ID NO: 5810 - DNA, 1161 bp, Ustilago hordei
  CDS (1)..(1161)
atgcaggcagaggaggacacatatcttcgatacaaaaagttacaacaacaccttgagtttctcaacactatggaagagtacgtcaaggacgagcaacgaaatctgaaacgcgagcttgtaagggcgcaagaggaggtcaagcgcattcagtcagtgccactcgtcattggtcaatttctcgagcccatcgaccaacacaccggcatagtcggttccaccaccggatccaattacgttgtccgaatcctttccacaatcgaccgcgagctgctcaaagccagctcaagtgttgcactacaccgtcactcgaatgctttggttgatgtgctgccacctgaggcagactcatccatcgctatgctgggtcaggacgagaagccgaccgagacctaccaggacatcggtggtatggacattcagaagcaggagatccgagaagctgtagagttgccattggtacagttcgacttgtatctccagatcggtatcgacccaccacgcggtgtattgctctacggacctcccggtacaggaaagaccatgttggtcaaggccgttgccaacgccaccactgccagctttatccgtgttgttggttccgagtttgtacagaagtatcttggtgaaggtccaagaatggtacgtgatgtcttccgacttgcgcgcgaaaatgcacccgccatcatcttcatcgacgagatcgacgccattgcgacaaagcgtttcgacgcacagaccggtgcggatcgtgaagtgcagcgtatcttgctcgaattgctcaaccagatggacggtttcgaccaaggcagcaacgtcaaggtcatcatggcaaccaaccgagcagacacactcgacccagcgcttcttcgacccggtcggttggatcgaaagattgaattcccaacaccatcacgtcgtgagaagcgtcttattttccagaccatctgcggcaagatgaacttgagtccagaggtcgacctcgaggactacgttgggcgacccgacaagctttccagcgccgagatcgccagtatttgccaggcggcaggtttgcaggctgtgcgcaagaaccgatacgtcatcatgcccgaggacttcgaggaagcgtggaagcagatcgtcaagaagccggacgactcgaagatggatttctaccagtag

SEQ ID NO: 5811 - protein, 386 aa, Ustilago hordei
MQAEEDTYLRYKKLQQHLEFLNTMEEYVKDEQRNLKRELVRAQEEVKRIQSVPLVIGQFLEPIDQHTGIVGSTTGSNYVVRILSTIDRELLKASSSVALHRHSNALVDVLPPEADSSIAMLGQDEKPTETYQDIGGMDIQKQEIREAVELPLVQFDLYLQIGIDPPRGVLLYGPPGTGKTMLVKAVANATTASFIRVVGSEFVQKYLGEGPRMVRDVFRLARENAPAIIFIDEIDAIATKRFDAQTGADREVQRILLELLNQMDGFDQGSNVKVIMATNRADTLDPALLRPGRLDRKIEFPTPSRREKRLIFQTICGKMNLSPEVDLEDYVGRPDKLSSAEIASICQAAGLQAVRKNRYVIMPEDFEEAWKQIVKKPDDSKMDFYQ

SEQ ID NO: 5812 - DNA, 1335 bp, Solanum tuberosum
  CDS (1)..(1335)
atgggtcaaggaacgcccggtggacttaaccggcaacttcccggagatcggaagaacgacggagacaagaaggagaaaaagtttgagccggctgctccaccggctcgagttggccgtaagcagcgcaaacagaagggacctgaagcggcagctcggctcccgactgttacaccgctgaccaagtgcaagcttcggctactaaagctcgaacggatcaaggattattttttgatggaggaggaattcgtggctaatcaggaaagactgaaacctcaggaagagaaaaccgaagaggatagatctaaggttgatgatctacgtggttctccgatgagcgtggggaatcttgaggagcttattgatgagaaccatgccatagtttcttcttcagttgggccagagtattatgttgggatcttgtcctttgtggataaggaccaattggaacctggttgtgccattttgatgcataataaggttctatctgttgttgggcttctacaagacgatgttgatccaatggtgtctgtcatgaaggttgagaaagctcctttggaatcctacgctgatataggtggattggatgctcagattcaggagattaaagaagctgttgagcttcccttgactcaccctgagctgtatgaagacattggtataaaacctcctaaaggggtcattctctatggggagcccgggactggcaaaaccttgcttgcaaaggcagttgcaaactccacttcggcaactttcttgcgtgttgttggaagtgaactgattcagaaatatttgggagatgggcctaaattggtgagggagctcttcagagttgctgacgatctctcaccttctatcgtcttcattgatgagattgatgcagtccgtaccaagaggtacgatgcacattctggtggtgaacgtgagatccagaggaccatgttagagttgttgaaccagctagatggttttgattccagaggagatgttaaagtgattcttgctacaaataaaatcgagagtcttgatcctgccctactgcgacctggtagaatagacaggaagattgagttccctcttcctgatattaaaacaaggaggcgcatattccagatacacacaggcaagatgactttgtctgatgatgtcaacctagaagaatttgttatgaccaaggatgaattttctggagctgatatcaaggcaatatgtactgaagctggattgcttgctctaagagaacggcgtatgaaggtgattcatgcagatttcaagaaggcaaaagataaggtgatgttcaagaagaaagagggagtgccagaaggactttacatgtag

SEQ ID NO: 5813 - protein, 444 aa, Solanum tuberosum
MGQGTPGGLNRQLPGDRKNDGDKKEKKFEPAAPPARVGRKQRKQKGPEAAARLPTVTPLTKCKLRLLKLERIKDYFLMEEEFVANQERLKPQEEKTEEDRSKVDDLRGSPMSVGNLEELIDENHAIVSSSVGPEYYVGILSFVDKDQLEPGCAILMHNKVLSVVGLLQDDVDPMVSVMKVEKAPLESYADIGGLDAQIQEIKEAVELPLTHPELYEDIGIKPPKGVILYGEPGTGKTLLAKAVANSTSATFLRVVGSELIQKYLGDGPKLVRELFRVADDLSPSIVFIDEIDAVRTKRYDAHSGGEREIQRTMLELLNQLDGFDSRGDVKVILATNKIESLDPALLRPGRIDRKIEFPLPDIKTRRRIFQIHTGKMTLSDDVNLEEFVMTKDEFSGADIKAICTEAGLLALRERRMKVIHADFKKAKDKVMFKKKEGVPEGLYM

SEQ ID NO: 5814 - DNA, 1218 bp, Drosophila melanogaster
  CDS (1)..(1218)
atgcgtttgttaaaggaggaaattgcccagtttcacgagcagtcgctggagaagtatgatggactggatccgcatgatctgtatgtactatataagaagcttcagatggagctggagctcatccaggtgcaggaggattatatcaaggaggagcaacgcaatctgaagaaggagttcatacacgctcaggaggaagttaagcgcataaaagccgtgcctctggtcattggccagtttctggaggcggtggatgaaaacaacggcatagtggcctccaccaccggatccaattactatgttcgagtgctatccaccattgacagggagcaactgaagccgtcctcttcggttgggctgcacaagcaaagcaattgtctggtcgatctggtgccaccggaggcggacagcaccatatcgatgctatcgccggatgagaaaccggatatcagctactccgacattggaggcttggacatccagaaacaggagatacgcgaggctgtcgagctgcccttgacccacgcccagctttacaagcaaattggcatcgatcccccacgcggcgtcctcctttttggaccacctggatgtggcaaaaccatgctggccaaggcggtggcccatcatacaactgcatcatttattcgtgtcgtgggctccgagttcgtccagaaatacctaggcgaggggccacgcatggtgcgagatcttttccgcctggccaagcagaattctccttcaattatcttcattgatgagatcgatgcgattgccaccaagcgctttgatgcacagacaggtgctgatcgcgaggtgcagcgcatcctgctggagctactcaaccaaatggatggctttgatgagaccaccaacattaaggttatcatggccaccaatcgtgcagataccttagatccggctctgttacgacccggccgtttggatcggaaaattgagttaccattgccggatcgtcgccagaagcgcttagttttcaccacaatcacctcgaaaatgaatgtgggtgaggatgtggatctggaggacatcattgcacgtccggacaagatctccaatgcggatatcaatgccatttgccaagaggctggtatgcatgcagtgcgcgagaatcgctatgtggtcaatgccaaggacttcgaaaagggttataagaccagcgtgcgcaaggacgaagctcagcatgagttctatagctag

SEQ ID NO: 5815 - protein, 405 aa, Drosophila melanogaster
MRLLKEEIAQFHEQSLEKYDGLDPHDLYVLYKKLQMELELIQVQEDYIKEEQRNLKKEFIHAQEEVKRIKAVPLVIGQFLEAVDENNGIVASTTGSNYYVRVLSTIDREQLKPSSSVGLHKQSNCLVDLVPPEADSTISMLSPDEKPDISYSDIGGLDIQKQEIREAVELPLTHAQLYKQIGIDPPRGVLLFGPPGCGKTMLAKAVAHHTTASFIRVVGSEFVQKYLGEGPRMVRDLFRLAKQNSPSIIFIDEIDAIATKRFDAQTGADREVQRILLELLNQMDGFDETTNIKVIMATNRADTLDPALLRPGRLDRKIELPLPDRRQKRLVFTTITSKMNVGEDVDLEDIIARPDKISNADINAICQEAGMHAVRENRYVVNAKDFEKGYKTSVRKDEAQHEFYS

SEQ ID NO: 5816 - DNA, 1221 bp, Haloferax volcanii DS2
  CDS (1)..(1221): transl_table=11
atgatgaccgatactgtggacgacgtcgatctcccctacgataaggactcggcgtcgcagcaggagaagatcaccgcccttcaagagcggctcgaagttctcgaaacgcagaacgaggagatgcgcgacaagctcctcgacacgaacgccgagaacaacaagtatcaacagaagctcgagcgccttacccacgagaacaagaagctcaagcagtcgccgctcttcgttgcgacggttcaggaaatcaccgacgagggggtcatcatcaagcagcacggtaacaaccaagaggccctcaccgaagtgaccgacgagatgcgcgaagagctcgaacccgacgcgcgcgtcgccgtgaacaactctctctccatcgtcaagcgactcgacaaggagacggacgtccgggcgcgcgtgatgcaggtcgaacacagccccgacgtgacctacgaggacattggcggcctcgaagagcagatgcaggaggtccgcgagacggtcgagatgccgctcgaccgccccgagatgttcgctgaggtcggcatcgaccccccgtcgggcgtgctcctctacggcccgccgggcaccgggaagacgatgctcgccaaggccgtcgccaaccagacgaacgcctcgttcatcaagatggccggctccgagctggtgcacaagttcatcggtgagggcgcgaagctcgtccgcgacctgttcgaagtcgctcgcgagaacgaacccgccgtcatcttcatcgacgagatagacgccatcgcctcgaagcggacggactcgaagacctccggcgacgccgaggtccagcgcacgatgatgcagttactcgccgagatggacggcttcgacgagcgcggcaacatccgcatcatcgcggcgaccaaccgcttcgacatgctcgaccccgcgattctccgccccggtcggttcgaccgcctcatcgaggtgcccaagccgaacgaggacggccgcgagataatcttccagattcacacccggaagatgaacgtctccgacgacgtggacttcgtcgaactcgccgagatggccgacaacgcctccggtgccgacatcaaggccgtctgtacggaagccgggatgttcgccatccgtgacgaccgcacggagatattcatgcaggacttcgtcgacgcctgggagaagattcagcaggaagcctcggacgagaccgaagtctcccgcgcgttcgcgtaa

SEQ ID NO: 5817 - protein, 406 aa, Haloferax volcanii DS2
MMTDTVDDVDLPYDKDSASQQEKITALQERLEVLETQNEEMRDKLLDTNAENNKYQQKLERLTHENKKLKQSPLFVATVQEITDEGVIIKQHGNNQEALTEVTDEMREELEPDARVAVNNSLSIVKRLDKETDVRARVMQVEHSPDVTYEDIGGLEEQMQEVRETVEMPLDRPEMFAEVGIDPPSGVLLYGPPGTGKTMLAKAVANQTNASFIKMAGSELVHKFIGEGAKLVRDLFEVARENEPAVIFIDEIDAIASKRTDSKTSGDAEVQRTMMQLLAEMDGFDERGNIRIIAATNRFDMLDPAILRPGRFDRLIEVPKPNEDGREIIFQIHTRKMNVSDDVDFVELAEMADNASGADIKAVCTEAGMFAIRDDRTEIFMQDFVDAWEKIQQEASDETEVSRAFA

SEQ ID NO: 5818 - DNA, 1230 bp, uncultured archaeon GZfos26E7
  CDS (1)..(1230): transl_table=11
atggatttggaaatggacgttgatgcggatatagactcaacagagttctccaagtatgtcgtggatcgcatgcagcaactcgaattgaaaaataacctgctcgagaagcagtaccagaaggtcgagactgaaaaacagcttgctgaagaccagcgattgaagtacgagcgcgaacttagaaaactgcggagtgaactggataaactgaaaacaaccccgcagctggtcggaacgctcgtaaacgttcttgaggagggtaaatcgattgtgcgatcgagcacaggtcctgaattcatcgtagggagttcccagttcatcaaagacggcgatctcaaacccggcgtgcaggttgcgcttaataaggagcatctgtcgatcgttgcggtcatccccggatcggaagaccccctggtgcaggcaatggaggtcatagaatctcctgacatcgattacaaccagatcggagggcttgataaacagattgaggtactcaggggtgctgttgaatttgcactcactaaaccagagatattcgaacgcatcggcatcgatcccccgaaaggcgttctgctgttcggtccaccaggcacgggaaagacccttcttgcaaaagcggttgccacccggactgatgccacattcatccgcgtggtcggttcggaactcgttcagaagtacatcggtgagggcgcacgtatggtgcgtgacgtattcgagatggcgcggaaaaaagcgcccgcgatcatattcatcgatgaactggactcgattggagcggtacggctcgatgatgccagttccggcggaagggaggttcagcgtacgctcatgcaactcctatcagagatggacggattcaattcgagaggcgatgtctgcatccttgcagcaaccaacaggtgggatatactcgatcccgcgctgatccgcccaggacgtttcgaccgactggtctacgtgcccataccggatcgtgaagcacgcgtcaagatcctgctcatccacacaaaaaagatgcgacttgcaggcgatgtcgattttgatcgcattgtgacactgaccgaggacgcgaacggcgctactttacgtgcgatcgtgatggaagcgggcatgtgtgcggtgcgcgaggatgcggatgcggtataccagaaggatttcgaggatgcgatcaagcacataatgaaccccgagggcatggtagaccggtattcagaaggcatgtttgcgtga

SEQ ID NO: 5819 - protein, 409 aa, uncultured archaeon GZfos26E7
MDLEMDVDADIDSTEFSKYVVDRMQQLELKNNLLEKQYQKVETEKQLAEDQRLKYERELRKLRSELDKLKTTPQLVGTLVNVLEEGKSIVRSSTGPEFIVGSSQFIKDGDLKPGVQVALNKEHLSIVAVIPGSEDPLVQAMEVIESPDIDYNQIGGLDKQIEVLRGAVEFALTKPEIFERIGIDPPKGVLLFGPPGTGKTLLAKAVATRTDATFIRVVGSELVQKYIGEGARMVRDVFEMARKKAPAIIFIDELDSIGAVRLDDASSGGREVQRTLMQLLSEMDGFNSRGDVCILAATNRWDILDPALIRPGRFDRLVYVPIPDREARVKILLIHTKKMRLAGDVDFDRIVTLTEDANGATLRAIVMEAGMCAVREDADAVYQKDFEDAIKHIMNPEGMVDRYSEGMFA

SEQ ID NO: 5820 - DNA, 1239 bp, Antonospora locustae
  CDS (1)..(1239)
  misc_feature (234)..(234): s is g or c
  misc_feature (236)..(236): s is g or c
atgggagatgcaaagccagtttcagaccaagacgtgggatttcttctaagctacggaaaaaattattacgcagacgaaataggcgaggtccagagccaaataaacactatttttgatcaagtatctgtgaagcttgggacaaaggaggtggaaacaggccttgcgccgccttcgctatgggacttgacaggagacaggagccggcagcttactgagcagacgctacaggtggcscstgttcagaaaatactcgatggagagaaggaccagaagtatgttatcaatgtcaggcagatggcgaagtttgtagttagcagaaacaaaaggcttgggagggatctaattgaggaaggaatgcgtgtgggtgttgacagggcaaagtacagcatcatgatgcctcttcccagaaagatcgatgcatctgttacgcttatgcaagttgaagaaagacctgacatcacatacaacgacattgggggatgcaaggaggagatagaaaagatcagagaggttgtggagatgccacttttgaaccccgagaagttcatcaaccttggaatagatccgccaaaaggtgttttactttacgggccgcccggaacaggtaagactctgctagcaagggcggttgcaaatcggacagacgcatgttttataagagtaataggctcagaacttgttcagaagtacgttggagagggtgcgcgcatggtgcgtgaaatttttgagctagccaagtctaaaaaggctgcaatcatattttttgacgaagtggatgcctttggaggaacaaggtttgaggatagtggtgaaaacgaagtgcagaggacaatgctggagctaatcaaccagctagacggctttgattctcgtggaaatatcaaagtgctgatggcaactaatcgtccggacacattgcaccctgctcttcttcgccccggaagactggacagaaaggtggagtttggccttccagacgcggagggaaggactcagatactgaagatccatgcaaagacaatgagtgttgaaaagaatattcggtatgatcttattgcgagaatgtgtccaaactctacaggtgctgagctgagaagtgtgtgcacagaggcaggtatgtttgcaataagagaaaggcgtaagatagcaactgagaacgacttcatggcagcagtcgacaaggtggtcaagggatacgccaagttttcggcaacaccaaaataccttacgtataattaa

SEQ ID NO: 5821 - protein, 412 aa, Antonospora locustae
  misc_feature (79)..(79): The Xaa at location 79 stands for Arg, or Pro.
MGDAKPVSDQDVGFLLSYGKNYYADEIGEVQSQINTIFDQVSVKLGTKEVETGLAPPSLWDLTGDRSRQLTEQTLQVAXVQKILDGEKDQKYVINVRQMAKFVVSRNKRLGRDLIEEGMRVGVDRAKYSIMMPLPRKIDASVTLMQVEERPDITYNDIGGCKEEIEKIREVVEMPLLNPEKFINLGIDPPKGVLLYGPPGTGKTLLARAVANRTDACFIRVIGSELVQKYVGEGARMVREIFELAKSKKAAIIFFDEVDAFGGTRFEDSGENEVQRTMLELINQLDGFDSRGNIKVLMATNRPDTLHPALLRPGRLDRKVEFGLPDAEGRTQILKIHAKTMSVEKNIRYDLIARMCPNSTGAELRSVCTEAGMFAIRERRKIATENDFMAAVDKVVKGYAKFSATPKYLTYN

SEQ ID NO: 5822 - DNA, 1389 bp, Neurospora crassa
  CDS (1)..(1389)
atgtcgacccttgaggaactcgacgacctcgatcgccgtgagcgcgaggacaagaagaaggatcaggacaaggataagaacaacaagaaagagggagatggcgatgccgagatgaaggatgccgagcccgaggccgatgacatcctagatgaggagatcctgagtttgagcacagaggacatcctgatgcggaagcgcctcctcgagaacgatgccagaatcatgaagagcgaataccagcggttatcacatgagagggctaccatgaaggacaagatcaaggagaaccaagaaaagattgccaacaaccgacaacttccgtatctcgtaggaaatgtcgttgaacttttggaccttgacccgaccgccgagtcctccgaagagggcgccaacatcgacttggatgccacgcgcgtgggtaaatcggcagtcatcaagacatcgaccagacagaccatctttctccctctcatcggcttggtcgaccccgagaagttgaagcccggcgatctcatcggtgttaacaaggattcgtaccttattctggatacgttgcccgccgagtacgacagcagagtcaaggctatggaggtcgacgagaagcctcaggagaagtacacagatgtcggtggtctcgacaaacagattgacgaacttgtcgaggctattgtgtggcctatgaaggaagccgaacggtttaagaagatcggtatcaaggcgcccaagggaataggagctttgatgtacggacctcccggaacaggcaagactttacttgccagagcttgcgccgctcagacagatgccacattcctcaagcttgctggcccccagctagtgcagatgtttatcggagacggtgccaagctcgtaagggactgcttcgccctagcaaaagagaaggccccgtcaattatcttcatcgacgagttggatgccgtcggtaccaagcgtttcgacagcgagaagtccggcgatcgtgaagtccagcgaaccatgttggagctcctcaaccagctcgacggtttcgcttctgacgaccgtatcaaggttctcgccgcgacgaaccgtatcgacgtcctcgaccccgctttgcttcgttccggtcgtcttgaccgcaagatcgagttccctcttccgaacgaggaggcacgcgcacagattctcaagattcattccaggaagatgaaggtcaaccccggcgttaactggggcgagttggcgcgcagcacggatgagtttggcggtgccatgctgaaggctgtgtgtgtcgaggctggcatgattgccctccgtatgggcaagaatcagattggacacgaacactacgttgacgctatttctgaggtgcaggccaagaagaaggaaaccgtcaacttctacgcttaa

SEQ ID NO: 5823 - protein, 462 aa, Neurospora crassa
MSTLEELDDLDRREREDKKKDQDKDKNNKKEGDGDAEMKDAEPEADDILDEEILSLSTEDILMRKRLLENDARIMKSEYQRLSHERATMKDKIKENQEKIANNRQLPYLVGNVVELLDLDPTAESSEEGANIDLDATRVGKSAVIKTSTRQTIFLPLIGLVDPEKLKPGDLIGVNKDSYLILDTLPAEYDSRVKAMEVDEKPQEKYTDVGGLDKQIDELVEAIVWPMKEAERFKKIGIKAPKGIGALMYGPPGTGKTLLARACAAQTDATFLKLAGPQLVQMFIGDGAKLVRDCFALAKEKAPSIIFIDELDAVGTKRFDSEKSGDREVQRTMLELLNQLDGFASDDRIKVLAATNRIDVLDPALLRSGRLDRKIEFPLPNEEARAQILKIHSRKMKVNPGVNWGELARSTDEFGGAMLKAVCVEAGMIALRMGKNQIGHEHYVDAISEVQAKKKETVNFYA

SEQ ID NO: 5824 - DNA, 1332 bp, Arabidopsis thaliana
  CDS (1)..(1332)
atgggtcaaggaccttccggcggattgcatcggcaaggagatcggaaaccagatggtggagagaagaaggagaagaagttcgaaccagccgcaccacctgctcgtgtagggaggaagcaacggaagcagaaaggacctgaagcggcggcgagattgccgacggtgactccttctactaaatgtaagcttcgattgctgaaattggagcgaatcaaggactatttgcttatggaggaagagttcgtagcgaatcaggagagattgaaacctcaggaagagaaagctgaggaagatagatctaaagttgatgatcttcgtggtacacctatgagtgttggcaatcttgaagagcttattgatgagaatcacgccattgtttcttcttcggttggtcctgagtactacgttggcattttgtctttcgttgataaggatcagcttgaacctggctgctctattttgatgcataacaaggtactctctgttgttgggattcttcaagatgaagtggatccaatggtgtctgtgatgaaagtggagaaggctcctttggagtcatatgctgacattggaggtttagaagctcagattcaggagattaaggaagctgttgagttacctttaacacatcccgagctgtatgaagatattggaattaagccaccaaaaggtgtgatcttgtatggtgagccaggcactgggaagacattgcttgctaaggcagtggcaaattctacttcagctactttcttgcgtgttgtcggtagtgaactgattcagaagtatttaggagatggtcccaagcttgtgagggaacttttcagggttgctgatgacctttctccttctattggtttcatagacgagattgatgctgttggcaccaagcggtatgacgcaaactcaggtggggaacgtgaaatccaaagaaccatgttggaactactgaaccagcttgatgggtttgattcaagaggagatgttaaggttattctcgcgacaaacaggatcgagagtcttgacccggcacttcttagaccaggccggatcgacaggaaaatcgaattccctcttccagatatcaaaacaagaagacgtatcttccagatacacacatcaaagatgactttggctgaagatgtgaacttagaagagtttgtaatgacaaaagacgagttctcaggagctgatataaaggcaatatgcacagaagctggtctgcttgctcttagagagcgtcggatgaaagtgacgcatgtggacttcaagaaggcgaaggagaaggttatgttcaagaagaaagaaggagttcctgaaggtctttacatgtga

SEQ ID NO: 5825 - protein, 443 aa, Arabidopsis thaliana
MGQGPSGGLHRQGDRKPDGGEKKEKKFEPAAPPARVGRKQRKQKGPEAAARLPTVTPSTKCKLRLLKLERIKDYLLMEEEFVANQERLKPQEEKAEEDRSKVDDLRGTPMSVGNLEELIDENHAIVSSSVGPEYYVGILSFVDKDQLEPGCSILMHNKVLSVVGILQDEVDPMVSVMKVEKAPLESYADIGGLEAQIQEIKEAVELPLTHPELYEDIGIKPPKGVILYGEPGTGKTLLAKAVANSTSATFLRVVGSELIQKYLGDGPKLVRELFRVADDLSPSIGFIDEIDAVGTKRYDANSGGEREIQRTMLELLNQLDGFDSRGDVKVILATNRIESLDPALLRPGRIDRKIEFPLPDIKTRRRIFQIHTSKMTLAEDVNLEEFVMTKDEFSGADIKAICTEAGLLALRERRMKVTHVDFKKAKEKVMFKKKEGVPEGLYM

SEQ ID NO: 5826 - DNA, 1332 bp, Arabidopsis thaliana
  CDS (1)..(1332)
atgggtcaaggaccttccggcggattgaatcggcaaggagatcggaaaccagatggtggagagaagaaggagaagaagttcgaaccagccgcaccacctgctcgtgtagggaggaagcaacggaagcagaaaggacctgaagcggcggcgagattgccgacggtgactccttctactaaatgtaagcttcgattgctgaaattggagcgaatcaaggactatttgcttatggaggaagagttcgtagcgaatcaggagagattgaaacctcaggaagagaaagctgaggaagatagatctaaagttgatgatcttcgtggtacacctatgagtgttggcaatcttgaagagcttattgatgagaatcacgccattgtttcttcttcggttggtcctgagtactacgttggcattttgtctttcgttgataaggatcagcttgaacctggctgctctattttgatgcataacaaggtactctctgttgttgggattcttcaagatgaagtggatccaatggtgtctgtggtgaaagtggagaaggctcctttggagtcatatgctgacattggaggtttagaagctcagattcaggagattaaggaagctgttgagttacctttaacacatcccgagctgtatgaagatattggaattaagccaccaaaaggtgtgatcttgtatggtgagccaggcactgggaagacattgcttgctaaggcagtggcaaattctacttcagctactttcttgcgtgttgtcggtagtgaactgattcagaagtatttaggagatggtcccaagcttgtgagggaacttttcagggttgctgatgacctttctccttctattgttttcatagacgagattgatgctgttggcaccaagcggtatgacgcaaactcaggtggggaacgtgaaatccaaagaaccatgttggaactactgaaccagcttgatgggtttgattcaagaggagatgttaaggttattctcgcgacaaacaggatcgagagtcttgacccggcacttcttagaccaggccggatcgacaggaaaatcgaattccctcttccagatatcaaaacaagaagacgtatcttccagatacacacatcaaagatgactttggctgaagatgtgaacttagaagagtttgtaatgacaaaagacgagttctcaggagctgatataaaggcaatatgcacagaagctggtctgcttgctcttagagagcgtcggatgaaagtgacgcatgtggacttcaagaaggcgaaggagaaggttatgttcaagaagaaagaaggagttcctgaaggtctttacatgtga

SEQ ID NO: 5827 - protein, 443 aa, Arabidopsis thaliana
MGQGPSGGLNRQGDRKPDGGEKKEKKFEPAAPPARVGRKQRKQKGPEAAARLPTVTPSTKCKLRLLKLERIKDYLLMEEEFVANQERLKPQEEKAEEDRSKVDDLRGTPMSVGNLEELIDENHAIVSSSVGPEYYVGILSFVDKDQLEPGCSILMHNKVLSVVGILQDEVDPMVSVVKVEKAPLESYADIGGLEAQIQEIKEAVELPLTHPELYEDIGIKPPKGVILYGEPGTGKTLLAKAVANSTSATFLRVVGSELIQKYLGDGPKLVRELFRVADDLSPSIVFIDEIDAVGTKRYDANSGGEREIQRTMLELLNQLDGFDSRGDVKVILATNRIESLDPALLRPGRIDRKIEFPLPDIKTRRRIFQIHTSKMTLAEDVNLEEFVMTKDEFSGADIKAICTEAGLLALRERRMKVTHVDFKKAKEKVMFKKKEGVPEGLYM

SEQ ID NO: 5828 - DNA, 1332 bp, Brassica napus
  CDS (1)..(1332)
atgggtcaaggaccatccggaggtttgaaccgtccaggagaccgcaagcccgacggcaacgaaaagaaagagaagaaattcgagccggcggctccaccgtctcgcgtcggaagaaagcagcggaagcaaaaaggacccgaggcggcggcgcggctcccgacggtgactccttccaccaaatgcaagctccggctgctcaaaatggagcggatcaaggactatctactgatggaggaagagttcgtggcgaaccaggagaggctgaagcctcaggaggagaaggcagaggaagatagatctaaggtcgatgatctgagaggtacgccgatgagcgttgggaacttggaggagctgattgatgagaatcacgcgatcgtgtcgtcttctgttgggcctgagtattacgttgggatattgtcttttgttgataaagatcagctcgagcctgggtgctcgattttgatgcataataaggttctgtctgttgttgggatactacaagatgaggtggatccgatggtgtctgtgatgaaagttgagaaggctccgttggagtcgtatgctgatattggaggtttagaagctcagattcaggagattaaggaagctgttgagttgcctttgactcatcctgagttgtatgaagatattggtattaagcctcccaagggtgtgattttgtatggtgagccaggaactgggaagacactgcttgctaaggctgtggcgaattctacatcagctactttcttgagagttgtagggagtgaactgattcagaagtatttgggagatggtcccaagctcgtgagggagcttttcagagttgccgatgacctttcaccatcaatcgtcttcattgatgagattgatgctgttggtaccaagcggtatgatgccaactcagggggtgagcgtgagatccaaagaactatgttggaacttctaaaccagcttgatgggtttgattcaagaggagacgtaaaggtcatccttgcaacaaacagaatagagagtctcgacccggcacttcttcgaccaggacgtattgataggaaaatcgagttcccgcttccagatatcaaaacgagaagacgaatcttccagatacacacatcaaagatgactctctcggaagatgtgaacttggaagagtttgtgatgacaaaagacgagttctcaggagctgatataaaggctatttgcactgaggctggtctgcttgctctcagggagcgccgaatgaaggtgacgcatccggatttcaagaaagcaaaggagaaggttatgttcaaaaagaaagaaggtgttcctgaaggcctttacatgtaa

SEQ ID NO: 5829 - protein, 443 aa, Brassica napus
MGQGPSGGLNRPGDRKPDGNEKKEKKFEPAAPPSRVGRKQRKQKGPEAAARLPTVTPSTKCKLRLLKMERIKDYLLMEEEFVANQERLKPQEEKAEEDRSKVDDLRGTPMSVGNLEELIDENHAIVSSSVGPEYYVGILSFVDKDQLEPGCSILMHNKVLSVVGILQDEVDPMVSVMKVEKAPLESYADIGGLEAQIQEIKEAVELPLTHPELYEDIGIKPPKGVILYGEPGTGKTLLAKAVANSTSATFLRVVGSELIQKYLGDGPKLVRELFRVADDLSPSIVFIDEIDAVGTKRYDANSGGEREIQRTMLELLNQLDGFDSRGDVKVILATNRIESLDPALLRPGRIDRKIEFPLPDIKTRRRIFQIHTSKMTLSEDVNLEEFVMTKDEFSGADIKAICTEAGLLALRERRMKVTHPDFKKAKEKVMFKKKEGVPEGLYM

SEQ ID NO: 5830 - DNA, 1314 bp, Pneumocystis carinii
  CDS (1)..(1314)
atgtttatgacagggcaatgttcaaaaaaagagtctaaatatgagccactggttatgtctacacgtataggaaggagatataatagaaataaggggccggatgcatcatataagtttccaatggtatatccgacgacaagatgtcgtttgaagcttttaaagatggaaaggatcaaagattatttgttattagagcaggaatttgtatctaatcaggagttgttgaagcttgattctgaaaaaagagatcaaaaaggcgaagaagaggatgatgataagcttcaaagtttaattggaagtcctatgggggtaggaacgttggaagagatgattgatgatgatcatgcaattgtatcatcagctacggggccggaatattatgtttctattatgtcttttgtaaataaggatttacttgagcctggatgttcggtattattacatcataaggcggtatcgattgttggggtgttaagtgatgatattgatccaatggtatcggtgatgaagttggacaaagcaccgacggagtcgtatgcggatattggggggcttgaatcacaaattcaagagatcaaagagacggtagaattgccattaacacatcctgagttgtatgaagagattggaattcgaccgcctaaaggagttattttatatggtgagccagggacgggaaagacattattagcaaaggcggtagcgaatcaaacgagtgcaacctttttacgtattgttggatcagaattaattcaaaaataccttggagatggaccaaaatttgtccgagagctctttcaaacggcacaggacaattcaccgtctatcgtatttattgatgaaatcgatgctattgggacgaaaaggtatgattcaacatcatcaggagaacgagaaatacaacgaacgatgcttgaacttttaaatcaattggatgggtttgatgatcgtggagatgtaaaggtaattatggcaacaaatcgaattaatgatttggatccggcattaatacggcccggaagaatggatagaaaaattttgtttgaaacaccagatcaaaatacaaaacgtaaaatctttcagattcatacgagtaaaatgaatctcggggatgatgtattaattgaagagtttataacagctaaagatgaaatgagtggcgcggatgtaaaggtaatagcaatttgcacggaagctggtctgcttgctcttagggaacgaagaatgcgtgtagttgccgatgactttagaaaagctaaagaacatgtattaaaaaccaaacaaaaaaatatacaaggcgaactttatatataa

SEQ ID NO: 5831 - protein, 437 aa, Pneumocystis carinii
MFMTGQCSKKESKYEPLVMSTRIGRRYNRNKGPDASYKFPMVYPTTRCRLKLLKMERIKDYLLLEQEFVSNQELLKLDSEKRDQKGEEEDDDKLQSLIGSPMGVGTLEEMIDDDHAIVSSATGPEYYVSIMSFVNKDLLEPGCSVLLHHKAVSIVGVLSDDIDPMVSVMKLDKAPTESYADIGGLESQIQEIKETVELPLTHPELYEEIGIRPPKGVILYGEPGTGKTLLAKAVANQTSATFLRIVGSELIQKYLGDGPKFVRELFQTAQDNSPSIVFIDEIDAIGTKRYDSTSSGEREIQRTMLELLNQLDGFDDRGDVKVIMATNRINDLDPALIRPGRMDRKILFETPDQNTKRKIFQIHTSKMNLGDDVLIEEFITAKDEMSGADVKVIAICTEAGLLALRERRMRVVADDFRKAKEHVLKTKQKNIQGELYI

SEQ ID NO: 5832 - DNA, 1332 bp, Arabidopsis thaliana
  CDS (1)..(1332)
atgggacaaggaccatcgggaggattgaatcggcaaggagatcggaaacctgatggtggagataagaaagagaagaagtttgagccggcggcaccaccggctcgtgtagtgaggaagcaaaggaagcagaaagggccagaggcggcggcgagacttccgacggtgactccgtctactaagtgtaagctccggttactgaaattggaacggatcaaggattatttgttgatggaggaagagtttgtggcgaatcaagagaggttgaaacctcaggaagagaaagctgaggaagatagatctaaggttgatgatcttcgtggtacacctatgagtgttgggaatttggaagagttgattgatgagaatcacgctattgtttcttcttctgttggacctgagtactacgttgggattttgtccttcgttgataaagatcagcttgaacctggatgttcgattttgatgcataataaggttctctctgttgttgggattctacaagatgaagtggatccaatggtgtctgtgatgaaagttgagaaagctcctttggagtcatatgctgatattggaggtttagaagctcagattcaggagattaaggaagctgttgagcttcctttgactcatcctgagttgtatgaagatattggtattaaaccaccaaagggtgtaattttgtatggtgagcctggaactgggaagacattgcttgctaaggcggttgcgaattcaacatcagctactttcttgagagttgttggtagtgagctgattcagaagtatttgggagatggtcctaagcttgtgagagaacttttcagagttgctgatgacctttcaccatcaatcgtcttcatagatgagattgatgctgttggtaccaagcggtatgacgctcactcaggaggtgaacgtgagatccaaagaactatgttggaacttctgaaccagcttgatggatttgattcaagaggagatgttaaggtcatccttgcaacaaacagaatcgagagtcttgacccagcactgcttcgacctggacggattgataggaaaatcgagttccctctcccagatatcaaaacaagaagacgtatcttccagatacacacatcgaagatgactctctcggaagatgtaaacctcgaagagtttgtgatgacgaaagacgagttctcaggagctgatataaaggctatatgcactgaggctggtctactagctctcagggagcgtcgtatgaaggtgacacatcctgatttcaagaaagcaaaggagaaggttatgttcaagaagaaagaaggcgtccctgaaggcctctacatgtaa

SEQ ID NO: 5833 - protein, 443 aa, Arabidopsis thaliana
MGQGPSGGLNRQGDRKPDGGDKKEKKFEPAAPPARVVRKQRKQKGPEAAARLPTVTPSTKCKLRLLKLERIKDYLLMEEEFVANQERLKPQEEKAEEDRSKVDDLRGTPMSVGNLEELIDENHAIVSSSVGPEYYVGILSFVDKDQLEPGCSILMHNKVLSVVGILQDEVDPMVSVMKVEKAPLESYADIGGLEAQIQEIKEAVELPLTHPELYEDIGIKPPKGVILYGEPGTGKTLLAKAVANSTSATFLRVVGSELIQKYLGDGPKLVRELFRVADDLSPSIVFIDEIDAVGTKRYDAHSGGEREIQRTMLELLNQLDGFDSRGDVKVILATNRIESLDPALLRPGRIDRKIEFPLPDIKTRRRIFQIHTSKMTLSEDVNLEEFVMTKDEFSGADIKAICTEAGLLALRERRMKVTHPDFKKAKEKVMFKKKEGVPEGLYM

SEQ ID NO: 5834 - DNA, 1272 bp, Aspergillus niger
  CDS (1)..(1272)
atgggagacgtcgccgtcgagaccccggcgaacaacgtcacgcctctcaccaaggcagctccattggacacgatccccaacatagactcgctcgagggcacaggaaacgatgggagcgatgaatacgccacactgaagagattgcagagacacctagagtacattcagcttcaggaggagtacatcaaggatgagcaaaggagcttgaagagagaacttgttcgtgcgcaggaagagatcaagcggatacagagtgtgcctttggttatcggccagttcatggaggcgatcgatcagaataccggtattgtgcagtcgtcgaccggttcgaattatgtcgtccgtatcctgtccacgctcgaccgcgagaagctcaagccttcgtcctcggtcgcactccaccgtcactccaacgcccttgtcgatatcttacctccggaggctgactcctccatcgctatgctgggcgagaatgagaagcctgatgtgacctatgcggatgttggtggtcttgacatgcagaagcaggagatcagggaagcagtcgagctgcccttgacgcaatttgacctttacaagcagatcggtatcgaccctcctcgcggggttctcctttacggccctcccggtacgggtaagaccatgctggtcaaggcggtggcaaacagcacaaccgccagctttatccgtgtaaacggctcggaattcgttcagaaatacctgggtgaaggacctcgcatggttcgtgatgttttcagaatggcgcgggagaactccccggccatcattttcatcgatgagattgatgccatcgccacgaagcgtttcgacgcccagaccggtgcagaccgtgaggtgcagcgtattctgctggagcttctcaaccagatggatggattcgagcagtcgagcaatgtcaaggttatcatggccaccaacagagccgatactctggatccggccttgctacgtccgggtcgtttggaccggaagatcgagtttccgtctttgcgcgaccggcgtgagcgccggttgattttctctacgatagcatccaagatgtcgctttcgccggaagttgacctggactcgctgattgtgcgcaatgagcccctctcgggtgcggtcattgccgcgatcatgcaagaggcgggtctccgtgctgtccggaagaaccgttacaacatcatccctaggtctgatctcgaggatgcttacgccgcccaggtgaagaccggacaggaagcggatagactcgaattctaccggtaa

SEQ ID NO: 5835 - protein, 423 aa, Aspergillus niger
MGDVAVETPANNVTPLTKAAPLDTIPNIDSLEGTGNDGSDEYATLKRLQRHLEYIQLQEEYIKDEQRSLKRELVRAQEEIKRIQSVPLVIGQFMEAIDQNTGIVQSSTGSNYVVRILSTLDREKLKPSSSVALHRHSNALVDILPPEADSSIAMLGENEKPDVTYADVGGLDMQKQEIREAVELPLTQFDLYKQIGIDPPRGVLLYGPPGTGKTMLVKAVANSTTASFIRVNGSEFVQKYLGEGPRMVRDVFRMARENSPAIIFIDEIDAIATKRFDAQTGADREVQRILLELLNQMDGFEQSSNVKVIMATNRADTLDPALLRPGRLDRKIEFPSLRDRRERRLIFSTIASKMSLSPEVDLDSLIVRNEPLSGAVIAAIMQEAGLRAVRKNRYNIIPRSDLEDAYAAQVKTGQEADRLEFYR

SEQ ID NO: 5836 - DNA, 1248 bp, Manduca sexta
  CDS (1)..(1248)
atggaagaaatcggcattattttacctgaaaaggatgatcaagtcactgatgccaaaggtcttccatttgcgggtccccaaactttcgatgagctggaatctgaggatttatacacaaaatataagaaactccaacgtatgctggagttcttagaagtacaggaagagtacataaaagatgagcaaaggaatctcaaaaaagaatacctacatgctcaagaggaagtgaaacgcatacagtctgtaccacttgtcattggccagttccttgaagctgtagaccaaaatactggcatagtgggcagcacaactggatctaactactatgtgaggattctgtcaacaattgacagagagctacttaaaccctcagcatctgtggcactccacaaacattcaaatgctctagtggatgtcctgccaccagaagctgatagctctatttctatgttacaagctgatgaaaagcctgatgtccagtattcggatattggtggcatggacacacagaaacaagagatacgagaggctgtagagctgcctctcactcatgtggagctgtacaggcagattggtattgagccaccacgtggtgtactcatgtacggcccacctggttgtggcaagaccatgttggcaaatgccgttgctcatcacactacagcggcgttcatccgtgtcgtgggatcggaattcgtccaaaagtacttgggtgaaggccctcgtatggttcgagatgtgttccgtctcgcaaaggaaaacagtccagctattatcttcattgatgaaattgacgctatcgctactaaaagatttgatgcccaaactggtgctgacagagaggtgcaaagaatcttattagagttgcttaaccagatggatggctttgatcaaacaaccaatgttaaagtaattatggccacaaatcgtgctgataccttagatcccgctctacttagacctggacgtttggataggaaaattgagttccctctacctgacagacgtcaaaagcgattgatcttctcaactataacagcaaaaatgaatctgtctgaagaagtagacttagaggagtttgtagcgcggcccgaccgtgtctccggggctgatatcaacgccatctgccaagaggccggcatgaacgcagtccgtgagaatagatatatcgtcttgcctaaagacttcgaaaagggctacaaaaataatatcaagaaggatgaaagtgaatatgaattctacaagtaa

SEQ ID NO: 5837 - protein, 415 aa, Manduca sexta
MEEIGIILPEKDDQVTDAKGLPFAGPQTFDELESEDLYTKYKKLQRMLEFLEVQEEYIKDEQRNLKKEYLHAQEEVKRIQSVPLVIGQFLEAVDQNTGIVGSTTGSNYYVRILSTIDRELLKPSASVALHKHSNALVDVLPPEADSSISMLQADEKPDVQYSDIGGMDTQKQEIREAVELPLTHVELYRQIGIEPPRGVLMYGPPGCGKTMLANAVAHHTTAAFIRVVGSEFVQKYLGEGPRMVRDVFRLAKENSPAIIFIDEIDAIATKRFDAQTGADREVQRILLELLNQMDGFDQTTNVKVIMATNRADTLDPALLRPGRLDRKIEFPLPDRRQKRLIFSTITAKMNLSEEVDLEEFVARPDRVSGADINAICQEAGMNAVRENRYIVLPKDFEKGYKNNIKKDESEYEFYK

SEQ ID NO: 5838 - DNA, 1287 bp, Saccharomyces cerevisiae
  CDS (1)..(1287)
atggaggaactaggtattgtgacacctgtcgaaaaggcagtcgaagaaaaaccagccgtcaaatcatacgcatcattgttggctcaactcaatggtacagtcaacaataacagtgccctgtctaatgtgaattctgatatatatttcaaattgaagaaattagaaaaagagtatgaactgctgactttgcaagaagactatattaaggacgaacaacgccatttgaaacgtgaattgaagagagctcaagaagaagtaaagagaatccagtcggttccattagttatcgggcaattcttagaacctattgatcagaacacaggtattgtttctagtaccacaggtatgagttatgtcgttagaatattatcaaccctagaccgtgaactattaaagccatctatgtctgtagctttacatcgtcattcaaatgctttagttgacatcctaccacctgattccgactctagcatatccgtaatgggcgaaaacgaaaaacctgacgtcacttatgcagatgttggtgggttagatatgcaaaagcaagaaatcagggaagccgtagagctgccattagttcaggctgatctatacgagcaaatcggtattgaccctcctaggggtgttctattatatggtccaccaggtaccggtaagacgatgcttgttaaagccgtcgccaatagtacaaaagctgcattcataagagttaacggctccgaatttgttcacaaatatcttggtgaaggtccaagaatggttcgtgacgtctttagactcgccagggaaaatgctccatccattatattcatagatgaggtagattccattgccacaaagcgttttgatgctcaaacgggttccgatcgtgaagtacagcgtatcctgattgagttgttgacacaaatggatggtttcgatcaatccaccaacgttaaagtcatcatggctacaaacagggcagacacattggacccagctttgctgagaccaggcagattagatagaaagattgagtttccctaccttcgtgataggcgtgaacgtcgtttgattttcggtaccattgccagtaagatgtcccttgccccagaagcggacttagactcgcttattattcgtaacgactctctatcaggtgctgttattgcagcgatcatgcaggaagctggtttaagagcagtgaggaaaaacagatatgtcatcttacaaagcgatctggaagaagcttacgccactcaagtcaagacagataataccgtcgataaattcgacttctacaaatga

SEQ ID NO: 5839 - protein, 428 aa, Saccharomyces cerevisiae
MEELGIVTPVEKAVEEKPAVKSYASLLAQLNGTVNNNSALSNVNSDIYFKLKKLEKEYELLTLQEDYIKDEQRHLKRELKRAQEEVKRIQSVPLVIGQFLEPIDQNTGIVSSTTGMSYVVRILSTLDRELLKPSMSVALHRHSNALVDILPPDSDSSISVMGENEKPDVTYADVGGLDMQKQEIREAVELPLVQADLYEQIGIDPPRGVLLYGPPGTGKTMLVKAVANSTKAAFIRVNGSEFVHKYLGEGPRMVRDVFRLARENAPSIIFIDEVDSIATKRFDAQTGSDREVQRILIELLTQMDGFDQSTNVKVIMATNRADTLDPALLRPGRLDRKIEFPYLRDRRERRLIFGTIASKMSLAPEADLDSLIIRNDSLSGAVIAAIMQEAGLRAVRKNRYVILQSDLEEAYATQVKTDNTVDKFDFYK

SEQ ID NO: 5840 - DNA, 1275 bp, Brassica napus
  CDS (1)..(1275)
atggcaacccccatggtagaagacacgtcaaccttcgaagaggatcagctcgcatccatgtccaccgaagacatcgtcagagctactcgcctcctcgacaacgagattcgaatcctcaaggaagatgcacaaagaacgaatcttgagtgtgattcgtacaaggagaagataaaggagaatcaggagaagattaaactcaacaagcagcttccttacttggttggcaacattgttgagatcttggagatgaatccggaagatgatgctgaggaagacggtgctaatattgatcttgactctcaacgcaaggggaagtgcgttgtgttgaaaacctctacacgacagactatctttctaccagttgttggccttgtggaccctgatagcttgaagcctggggacttggttggagttaataaagacagttacttgattttggataccttgccgtctgagtatgactctagagttaaagccatggaggtcgatgagaaacctaccgaagattacaatgacattggaggactggagaagcagatccaagagcttgtagaggctattgtgctccccatgacgcacaaggagcgtttcgagaagctaggtgttcgaccaccaaagggagtgctcctgtatggtcctccagggactggtaaaactctaatggctcgtgcttgtgcagcacagaccaatgccaccttcctcaaattggcaggccctcaattggtccagatgtttattggagacggagcaaaacttgtgcgtgatgcctttcaactagcaaaagagaaagctccatgcatcatcttcattgatgaaatcgatgcaattggtacaaagcgttttgacagtgaagtaagtggagacagggaagtgcaaaggactatgttggagctgctcaatcagcttgatggattcagtagcgatgagcgtattaaggtgattgcagcaactaaccgtgcagatattttggacccagcactgatgcgttctggtcgtctagacaggaagattgagttcccacatccaacagaagaagctagagccagaatcttgcagattcactcgaggaagatgaatgttcacccagacgtcaactttgaggagcttgcaagatcaactgatgatttcaatggtgctcagctgaaagcagtttgtgtagaggctggcatgttagctcttcgccgcgatgccacagaggtgaaccatgaggacttcaatgaaggtatcatccaagtccaggccaagaagaaagcaagcttgaactactacgcttaa

SEQ ID NO: 5841 - protein, 424 aa, Brassica napus
MATPMVEDTSTFEEDQLASMSTEDIVRATRLLDNEIRILKEDAQRTNLECDSYKEKIKENQEKIKLNKQLPYLVGNIVEILEMNPEDDAEEDGANIDLDSQRKGKCVVLKTSTRQTIFLPVVGLVDPDSLKPGDLVGVNKDSYLILDTLPSEYDSRVKAMEVDEKPTEDYNDIGGLEKQIQELVEAIVLPMTHKERFEKLGVRPPKGVLLYGPPGTGKTLMARACAAQTNATFLKLAGPQLVQMFIGDGAKLVRDAFQLAKEKAPCIIFIDEIDAIGTKRFDSEVSGDREVQRTMLELLNQLDGFSSDERIKVIAATNRADILDPALMRSGRLDRKIEFPHPTEEARARILQIHSRKMNVHPDVNFEELARSTDDFNGAQLKAVCVEAGMLALRRDATEVNHEDFNEGIIQVQAKKKASLNYYA

SEQ ID NO: 5842 - DNA, 1275 bp, Brassica napus
  CDS (1)..(1275)
atggcaactccgatggtagaagacacgtcaagcttcgaagaggatcagctcgcttccatgtccaccgaagatatcgtcagagctactcgcctcctcgagaacgagattcgaatcctcaaggaagacgctcagaggacaaatcttgaatgcgattcttacaaggagaagattaaagagaatcaggagaagattaaactcaacaagcagcttccttacttggttggcaacattgttgagatcttggagatgaatcccgaagatgatgctgaagaagacggtgctaatattgaccttgactctcaacggaaaggaaagtgtgttgtcttgaaaacctctacacgtcagactatctttctaccagttgttggtctcgtggaccctgatagcttgaagcctggggacttggttggagtaaacaaagacagttaccttattttggataccttgccatcagagtatgactctagagttaaagccatggaggtcgatgagaaaccaaccgaagattacaatgacattggaggactggagaagcagatccaagagcttgtagaagctattgtgctccccatgacgcacaaggagcgtttcgagaagcttggtgttcgtccaccaaagggagtgctcttgtatggtcctccagggactggtaaaactttgatggctcgtgcctgtgcagcacagaccaatgccactttcctcaaattggcaggccctcaattggtccagatgtttattggagacggagcaaaacttgttcgtgatgcctttcaactagcgaaagataaagctccgtgtatcatcttcattgatgagatcgatgcaattggtacaaagcgttttgacagtgaagtaagcggagacagggaagtgcagaggactatgttggagctactcaatcagcttgatggattcagtagtgatgagcgtattaaggtgattgcagctactaaccgagcagatattctggacccagcacttatgcgttctggtcggctagacaggaagattgagttcccacatccaacagaagaagcaagagccagaatcttacagatccactcgaggaagatgaatgtccacccagacgtcaactttgaggagcttgcgagatcaacagatgatttcaatggtgctcaactgaaagcagtatgtgtagaggctggtatgttagctcttcgtcgtgatgccacagaggtgaaccatgaggacttcaatgaaggtatcatccaagtccaggccaagaagaaagcaagcttgaactactacgcctaa

SEQ ID NO: 5843 - protein, 424 aa, Brassica napus
MATPMVEDTSSFEEDQLASMSTEDIVRATRLLENEIRILKEDAQRTNLECDSYKEKIKENQEKIKLNKQLPYLVGNIVEILEMNPEDDAEEDGANIDLDSQRKGKCVVLKTSTRQTIFLPVVGLVDPDSLKPGDLVGVNKDSYLILDTLPSEYDSRVKAMEVDEKPTEDYNDIGGLEKQIQELVEAIVLPMTHKERFEKLGVRPPKGVLLYGPPGTGKTLMARACAAQTNATFLKLAGPQLVQMFIGDGAKLVRDAFQLAKDKAPCIIFIDEIDAIGTKRFDSEVSGDREVQRTMLELLNQLDGFSSDERIKVIAATNRADILDPALMRSGRLDRKIEFPHPTEEARARILQIHSRKMNVHPDVNFEELARSTDDFNGAQLKAVCVEAGMLALRRDATEVNHEDFNEGIIQVQAKKKASLNYYA

SEQ ID NO: 5844 - DNA, 1281 bp, Brassica napus
  CDS (1)..(1281)
atgacgagagatatcgaagatgagatcagagacgagaagaaccctcgcccccttgacgaagacgacatcgctctcctcaagacttacgggttaagtccttactctgcagctaacaagaaagttgagaaagaaatcaaggagctcgccaagaggatcaacgatctctgtggcatcaaggagtctgatactggtttagctcttcctagtcaatgggatctcgtttctgataagcagatgatgcaagaggagcaacctcttcaggttgctagatgcacgaagatcattagtccaaacactgaagatgccaagtacgtcatcaatgtcaaacagatagccaagtttgtcgttggccttggagataaagtttctcccactgacattgaagaaggcatgcgcgtaggagttgataggaccaagtatcagatacagattcctctgcctccaaagatcgatcctagtgtcaccatgatgactgttgaagagaagcctgatgttacttacaatgatgttggtggctgcaaggagcagattgagaagatgagagaggtggttgagctgccaatgcttcatccagagaagtttgtgaagcttggaatagatcctcccaagggagttctctgctacggtcctcctggtaccggcaaaacccttttggccagagctgttgctaacagaaccgatgcttgctttatcagggttatcggcagcgagcttgttcagaagtatgtcggtgagggagctaggatggttcgtgaactgttccagatggcacggtccaaaaaggcttgcattgtgttctttgatgaagttgatgccattggtggtgcaagatttgatgacggtgtaggaggtgataacgaagtccagcgtactatgcttgagattgtgaatcagcttgatgggttcgatgcacgtggtaacatcaaggttctcatggcaacaaacaggcctgacacactggaccctgctcttctacgtcctggacgtcttgaccgtaaggttgagtttggattgcctgatctggagagcagaacacagatcttcaagattcacacacgaaccatgaactgcgagagagacatccgtttcgaactccttgctcgcctctgcccaaactcaactggagctgatatcaggagtgtatgcactgaggctggaatgtatgcaatcagagctaggaggaagactgtgactgagaaagactttctggatgcagtgaacaaagtcatcaaaggttatcagaagttcagtgctactcccaaatacatggtctacaattag

SEQ ID NO: 5845 - protein, 426 aa, Brassica napus
MTRDIEDEIRDEKNPRPLDEDDIALLKTYGLSPYSAANKKVEKEIKELAKRINDLCGIKESDTGLALPSQWDLVSDKQMMQEEQPLQVARCTKIISPNTEDAKYVINVKQIAKFVVGLGDKVSPTDIEEGMRVGVDRTKYQIQIPLPPKIDPSVTMMTVEEKPDVTYNDVGGCKEQIEKMREVVELPMLHPEKFVKLGIDPPKGVLCYGPPGTGKTLLARAVANRTDACFIRVIGSELVQKYVGEGARMVRELFQMARSKKACIVFFDEVDAIGGARFDDGVGGDNEVQRTMLEIVNQLDGFDARGNIKVLMATNRPDTLDPALLRPGRLDRKVEFGLPDLESRTQIFKIHTRTMNCERDIRFELLARLCPNSTGADIRSVCTEAGMYAIRARRKTVTEKDFLDAVNKVIKGYQKFSATPKYMVYN

SEQ ID NO: 5846 - DNA, 1203 bp, Triticum aestivum
  CDS (1)..(1203)
atgtctaccactgaaggcgaagaagccggaaggcggcgtactgcggtcgccgagtatcggaagaagctccttcagcagagggaactcgaatcaagaagtcgcgcagcaaaagacagtttgcgggtttcaaagaaggaatatgcgaaaaccgaggatgacctgaagtcgttacagagtgttggacagatcattggcgaagtacttaggccacttgacaatgaacgcatgatagttaaagcaagcagcggtccgaggtatgtggttggctgccgtagcaaagtggacaaagaaaagctgactgctggaactcgcgttgttcttgatatgactactctgacgatcatgagggctcttccccgagaagttgatccagttgtatacaacatgctccacgaagaccccggtaatgttagctactctgctgttggagggttgtcggatcagattcgggagctccgagaatccatagaactccctctcatgaatcctgaactctttctgagagtggggattaagcctccaaagggtgttctcctttacggacctccaggaactgggaaaacattgttagccagggcaatcgcgagcaacatcgatgccaacttcctaaaggttgtatctagtgctataatcgacaagtacattggtgaaagcgcgaggttgattcgagagatgtttaattacgctcgcgatcatcaaccatgcatcatatttatggacgagatcgatgccattggtggacgacgtttcagcgaagggacgagcgctgatcgtgaaattcaacgaactctcatggagttgcttaatcaattagatggatttgatcagctcggcaaggttaaaatgatcatggcaaccaacagaccggatgttctggatcctgctcttcttcgcccgggccgtctagacaggaagatcgagattccattgccgaatgagcagtcgaggatggaaattctcaagattcatgctgctggcattgccaaacacggcgaaatcgactatgaagcagttgtgaaactagctgagggtttcaatggcgccgatcttcgtaatgtatgtaccgaagccggcatgtctgcaatccgtgcagaacgcgactatgtcatccatgaagatttcatgaaggccgtcagaaagttgaatgaagcgaagaaactcgaatcaagttctcactacaatgctgatttcgggaaggaatga

SEQ ID NO: 5847 - protein, 400 aa, Triticum aestivum
MSTTEGEEAGRRRTAVAEYRKKLLQQRELESRSRAAKDSLRVSKKEYAKTEDDLKSLQSVGQIIGEVLRPLDNERMIVKASSGPRYVVGCRSKVDKEKLTAGTRVVLDMTTLTIMRALPREVDPVVYNMLHEDPGNVSYSAVGGLSDQIRELRESIELPLMNPELFLRVGIKPPKGVLLYGPPGTGKTLLARAIASNIDANFLKVVSSAIIDKYIGESARLIREMFNYARDHQPCIIFMDEIDAIGGRRFSEGTSADREIQRTLMELLNQLDGFDQLGKVKMIMATNRPDVLDPALLRPGRLDRKIEIPLPNEQSRMEILKIHAAGIAKHGEIDYEAVVKLAEGFNGADLRNVCTEAGMSAIRAERDYVIHEDFMKAVRKLNEAKKLESSSHYNADFGKE

SEQ ID NO: 5848 - DNA, 1203 bp, Zea mays
  CDS (1)..(1203)
atggccgacggggaggacgccgccgccgcgcgccgccgggccgccatcacagactaccgcaagaagctgctcaactgcagggagctagagtcgcgcgtcggcaccgtgagagaaagccttaaaactgcaaagaaggattttaccaagactgaggacgacttaaagtctctgcagagtgtggggcaaataattggagaagtactccgacctcttgataatgaacgctttatcgtgaaggccagcagtggtccccgatacgtggtcggttgccgaagtaaagtggacaaggagaagttgacatctggtactcgtgttgtacttgacatgacgaccttgacaataatgcgcactcttccacgggaggtggatcctgtggtatataacatgcttcatgaagatccaggaaatgtcagttactctgctgtaggtggtctgtctgatcagattagagagctcagggagtccattgagttaccacttatgaatcctgaactctttcttcgggtgggaattaagcctcctaagggtgttctactctacggtcctccaggaactgggaagaccctattggcaagggctatcgcaagtaacatcgatgccaactttttgaagattgtttcaagtgctattatcgacaaatacattggagaaagtgctcgtttgattagagaaatgtttggctatgcacgtgaccaccaaccatgcatcatcttcatggatgaaattgatgctattggtggtcgaagatttagtgagggaactagtgctgatcgtgagattcagcggacgttgatggagctccttaaccaattagatggatttgatgagctaggaaaggtaaaaatgatcatggccacaaatcgacctgatgttctggacccggcgctcctgcgtcctggacgtttagataggaagattgaaattccgctacccaacgagcaatcaagaatggaagttctaaaaatccatgcagccggtatcgccaagcatggggagattgattatgaagcagtcgtgaaactagctgaaggtttcaatggggctgatcttcggaacgtgtgcaccgaagctggcatggctgcaattcgtgcagagagagattacgtagtccacgaagacttcatgaaggctgtgaggaaactaaatgatgcaaaaaagctggaatcgagtgcgcattacagtgcagattttggcaaagagtaa

SEQ ID NO: 5849 - protein, 400 aa, Zea mays
MADGEDAAAARRRAAITDYRKKLLNCRELESRVGTVRESLKTAKKDFTKTEDDLKSLQSVGQIIGEVLRPLDNERFIVKASSGPRYVVGCRSKVDKEKLTSGTRVVLDMTTLTIMRTLPREVDPVVYNMLHEDPGNVSYSAVGGLSDQIRELRESIELPLMNPELFLRVGIKPPKGVLLYGPPGTGKTLLARAIASNIDANFLKIVSSAIIDKYIGESARLIREMFGYARDHQPCIIFMDEIDAIGGRRFSEGTSADREIQRTLMELLNQLDGFDELGKVKMIMATNRPDVLDPALLRPGRLDRKIEIPLPNEQSRMEVLKIHAAGIAKHGEIDYEAVVKLAEGFNGADLRNVCTEAGMAAIRAERDYVVHEDFMKAVRKLNDAKKLESSAHYSADFGKE

SEQ ID NO: 5850 - DNA, 1287 bp, Zea mays
  CDS (1)..(1287)
atgtcgtcgtcggcgcccgcaccggccgccatggccgtggacgacgcggaggacgaccagctcgcctccatgtccacggaggagatcaccagggcctcccgtctcctcgacaacgagatccgcgtccacaaggacgagctgcagcggtcgaacctggagctggagtctatcaaggagaagaccaaggagaaccaggagaagattaagctcaacaagcagctgccgtacctcgtcggcaacatcgtcgagattttggaaatgaaccctgaggatgaggctgaagaagatggtgctaacatcgatctggactcacaaaggaaaggaaaatgtgttgttctgaagacatccaccagacaaaccatattccttcctgtaattgggttagttgaccccgataagctgaagcctggcgatttagttggagttaacaaagacagctacttgatattagatacattgccttcagagtatgactcacgggttaaggcaatggaagtagatgagaaacctactgaggattacaatgacatcggcggacttgagaaacagattcaagagcttgtggaagcaatagtgttaccaatgacacacaaggaccgatttcaaaaattgggcattcgtccccccaaaggggttcttttgtatggaccccctgggaccgggaaaacgctcatggctcgtgcatgcgctgcacagactaatgcaacatttctgaaattggctggtccacaacttgtccagatgttcattggtgatggagctaagcttgttagagatgcttttcagcttgctaaggagaaagccccgtgcatcatctttattgatgaaattgatgccattggaacaaagcgttttgacagtgaagttagtggcgatagagaagtgcaaaggacaatgttggaattgctgaatcagcttgatggatttagcagcgatgagaggataaaggtgatagctgcaacaaatcgtgctgatattcttgatcctgctctgatgagatctggtcgtctggaccgtaagattgagttccctcatccatcagaggaagcaagagctagaatcctgcagatccactcgaggaaaatgaatgtgaatccagatgtcaactttgaagagttggcgcgttcaaccgatgatttcaatggcgctcagctaaaggctgtttgcgtagaggctggcatgctcgctctacgccgagatgctacagaggttacccacgaggatttcaacgaggggatcatccaagtgcaggcaaagaagaagtccagcttgaattactacgcgtaa

SEQ ID NO: 5851 - protein, 428 aa, Zea mays
MSSSAPAPAAMAVDDAEDDQLASMSTEEITRASRLLDNEIRVHKDELQRSNLELESIKEKTKENQEKIKLNKQLPYLVGNIVEILEMNPEDEAEEDGANIDLDSQRKGKCVVLKTSTRQTIFLPVIGLVDPDKLKPGDLVGVNKDSYLILDTLPSEYDSRVKAMEVDEKPTEDYNDIGGLEKQIQELVEAIVLPMTHKDRFQKLGIRPPKGVLLYGPPGTGKTLMARACAAQTNATFLKLAGPQLVQMFIGDGAKLVRDAFQLAKEKAPCIIFIDEIDAIGTKRFDSEVSGDREVQRTMLELLNQLDGFSSDERIKVIAATNRADILDPALMRSGRLDRKIEFPHPSEEARARILQIHSRKMNVNPDVNFEELARSTDDFNGAQLKAVCVEAGMLALRRDATEVTHEDFNEGIIQVQAKKKSSLNYYA

SEQ ID NO: 5852 - DNA, 1281 bp, Brassica napus
  CDS (1)..(1281)
atgacgagagacattgaagatgagattcgagacgagaagaatcctcgccccctcgacgaagacgatatcgctctcctcaagacttacgggttagggccttactctgcgccgataaagaaagttgagaaagagatcaaggagcttgccaaaaagatcaacgatctctgtggtatcaaggagtctgatactggtttagctcctcccagccagtgggatctcgtttctgataaacagatgatgcaagaggagcaacctctccaggttgctagatgcaccaagatcattagtcccaacactgaagacgccaagtacgtcattaacgtcaaacagattgcgaagtttgtcgttggtcttggtgataaagtttctcctactgatattgaagaaggcatgcgcgttggagttgataggaataagtatcagattcagattcctctacctccaaagatcgatcctagtgtcaccatgatgactgtcgaagagaaacctgatgttacttacaatgacgttggtggctgcaaggagcagatcgagaagatgcgggaggtcgttgaactgccaatgcttcacccagagaagtttgtgaagcttggaatagatcctcccaagggagttctctgctacggtcctcctggtaccggtaaaaccctgttggctagagctgttgccaacagaaccgatgcttgctttatcagggttattggcagtgagcttgttcagaagtatgtcggtgaaggagctaggatggttcgtgaactgtttcagatggcacggtccaaaaaagcttgcattgtgttctttgatgaagttgatgccattggtggtgcaagatttgatgacggtgtaggaggtgacaacgaagtccagcgtactatgcttgagattgtgaatcagcttgatgggtttgacgcacgtggtaacatcaaggttcttatggcaacaaacaggcctgacacgctggaccctgctcttctacgtcctggacgtcttgaccgtaaggttgagtttggtttgcctgatctggagagcagaacacagatcttcaagattcacacaagaaccatgaactgcgagagagacatccgttttgaactccttgctcgcctctgcccaaactcaaccggagctgatatcagaagtgtgtgcactgaagctggaatgtatgcaatcagagctaggcgaaagacagtaactgagaaagactttctggatgcagtgaacaaagtcatcaagggttatcagaagttcagtgcaactcccaagtacatggtctacaactag

SEQ ID NO: 5853 - protein, 426 aa, Brassica napus
MTRDIEDEIRDEKNPRPLDEDDIALLKTYGLGPYSAPIKKVEKEIKELAKKINDLCGIKESDTGLAPPSQWDLVSDKQMMQEEQPLQVARCTKIISPNTEDAKYVINVKQIAKFVVGLGDKVSPTDIEEGMRVGVDRNKYQIQIPLPPKIDPSVTMMTVEEKPDVTYNDVGGCKEQIEKMREVVELPMLHPEKFVKLGIDPPKGVLCYGPPGTGKTLLARAVANRTDACFIRVIGSELVQKYVGEGARMVRELFQMARSKKACIVFFDEVDAIGGARFDDGVGGDNEVQRTMLEIVNQLDGFDARGNIKVLMATNRPDTLDPALLRPGRLDRKVEFGLPDLESRTQIFKIHTRTMNCERDIRFELLARLCPNSTGADIRSVCTEAGMYAIRARRKTVTEKDFLDAVNKVIKGYQKFSATPKYMVYN

SEQ ID NO: 5854 - DNA, 1215 bp, Brassica napus
  CDS (1)..(1215)
atggctgcagcgatggttctcgaccccaaagcatctcctccgctgatggatctctccacagccgacgaggaagatccctactcccgcctcaaatcgctcgaacggcaactggagttcaccgacatccaagaggaatacgtgaaagacgagcagaagaatctcaaacgcgagctcttacgcgctcaagaagaggtcaagcgaatccaatccgtgcctctagtgattggccagttcatggagatggttgatcagaacaacggcatcgttggatccaccacgggctccaattactatgtgaggattctcagcaccatcaacagagaagacttaaagccttctgcttccgtcgcccttcaccgtcactccaacgccctcgttgatgtgttgccgcctgaggctgattctagcatctctcttctcagtcaatctgagaagcctgacgtctcctacaatgatattggaggatgtgatattcagaaacaggagattcgtgaggctgttgagttgccacttacacaccacgagctttacaagcagattggtattgaccctccacgaggtgtcttgctctatggaccccctggtactgggaagactatgttggctaaggctgttgctaaccatacaacagctgctttcattagggttgttggctccgagtttgtgcagaagtacctcggcgagggacctcgtatggttcgtgatgtcttccgtcttgccaaggagaatgctccagctatcatctttattgatgaggtagatgccatcgctactgctaggttcgatgctcaaactggagctgatagggaagttcagcgtattctcatggaactacttaatcagatggatggatttgaccagaccgtgaatgtcaaggtcataatggcaaccaacagggcagacactcttgatcctgctctcttacgtcctgggagacttgatcgtaagattgagttcccccttcctgatagacgtcaaaagaggcttgttttccaggtatgcaccgccaaaatgaacctcagcgatgaggttgacttggaagactatgtttcacggcctgataaaattagcgctgctgagatagcagcaatctgccaggaagctggaatgcatgcggtgcgtaagaacagatatgtgatactgcccaaggacttcgagaagggttaccgctcaaatgtgaagaagccagacacggactttgagttctacaagtga

SEQ ID NO: 5855 - protein, 404 aa, Brassica napus
MAAAMVLDPKASPPLMDLSTADEEDPYSRLKSLERQLEFTDIQEEYVKDEQKNLKRELLRAQEEVKRIQSVPLVIGQFMEMVDQNNGIVGSTTGSNYYVRILSTINREDLKPSASVALHRHSNALVDVLPPEADSSISLLSQSEKPDVSYNDIGGCDIQKQEIREAVELPLTHHELYKQIGIDPPRGVLLYGPPGTGKTMLAKAVANHTTAAFIRVVGSEFVQKYLGEGPRMVRDVFRLAKENAPAIIFIDEVDAIATARFDAQTGADREVQRILMELLNQMDGFDQTVNVKVIMATNRADTLDPALLRPGRLDRKIEFPLPDRRQKRLVFQVCTAKMNLSDEVDLEDYVSRPDKISAAEIAAICQEAGMHAVRKNRYVILPKDFEKGYRSNVKKPDTDFEFYK

SEQ ID NO: 5856 - DNA, 1275 bp, Brassica napus
  CDS (1)..(1275)
atggcaacccccatggtagaagacacgtcgagcttcgaagaggatcagctcgcatccatgtccacagaagatatcatcagagctactcgcctcctcgacaacgagattcgaatcctcaaggaagatgcacaaagaacgaatcttgagtgtgattcttacaaggagaagataaaggagaaccaggagaagattaaactcaacaagcagcttccttacttggttggcaacattgttgagatcttggagatgaatccagaagatgatgctgaggaagacggtgctaatattgaccttgactctcaacggaaggggaagtgtgttgttttgaaaacctctacacgacagactatctttctaccagttgttggccttgtggaccctgatagcttgaagcctggggacttggttggagttaataaagacagttacctgattctggataccttgccgtctgagtatgactctagggttaaagccatggaggtcgatgagaaacctaccgaagattacaatgacattggaggactggagaagcagatccaagagcttgtagaggctattgtgcttcccatgacgcacaaggagcgtttcgagaagcttggtgttcgtccaccaaagggagtgctcctgtatggtcctccagggactggtaaaactctaatggctcgtgcttgtgcagcacagaccaatgccaccttcctcaaattggcaggtcctcaattggtccagatgtttattggagacggagcaaaacttgtccgtgatgcctttcaactagcaaaagagaaagctccatgcatcatcttcattgatgaaatcgatgcaattggtacaaagcgttttgacagtgaagtaagcggagacagggaagtgcagaggactatgttggagctgctcaatcagcttgatggattcagtagcgatgagcgtattaaggtgattgcagccactaaccgagcagatattctggacccagcacttatgcgttctggtcgactagacaggaagattgagttcccacatccaacagaagaagcaagagccagaatcttacagattcactcgaggaagatgaatgtccacccagacgtcaactttgaggagcttgcgagatcaacagatgatttcaatggtgctcaactgaaagcagtatgtgtagaggctggtatgttagctcttcgtcgtgatgccacagaggtgaaccatgaggacttcaatgaaggtatcatccaagtccaggccaagaagaaagcaagcttgaactactacgcctaa

SEQ ID NO: 5857 - protein, 424 aa, Brassica napus
MATPMVEDTSSFEEDQLASMSTEDIIRATRLLDNEIRILKEDAQRTNLECDSYKEKIKENQEKIKLNKQLPYLVGNIVEILEMNPEDDAEEDGANIDLDSQRKGKCVVLKTSTRQTIFLPVVGLVDPDSLKPGDLVGVNKDSYLILDTLPSEYDSRVKAMEVDEKPTEDYNDIGGLEKQIQELVEAIVLPMTHKERFEKLGVRPPKGVLLYGPPGTGKTLMARACAAQTNATFLKLAGPQLVQMFIGDGAKLVRDAFQLAKEKAPCIIFIDEIDAIGTKRFDSEVSGDREVQRTMLELLNQLDGFSSDERIKVIAATNRADILDPALMRSGRLDRKIEFPHPTEEARARILQIHSRKMNVHPDVNFEELARSTDDFNGAQLKAVCVEAGMLALRRDATEVNHEDFNEGIIQVQAKKKASLNYYA

SEQ ID NO: 5858 - DNA, 1215 bp, Brassica napus
  CDS (1)..(1215)
atggccgcagcgatggttctcgaccctaaagcatctccgccactgatggatcaatccacaaccgacgaagaagatccctactcccgtctcaaatccctcgaacggcagctagagttcacggacatccaagaggaatacgttaaagacgagcaaaagaatctcaaacgagagctcttacgcgctcaagaggaggtcaagagaatccaatccgtgcctctagtgattggccagttcatggagatggtggatcagaacaacggcatcgtcggatccaccacaggctccaattactacgttcggattctcagcaccatcaacagagaagacctgaagccttctgcttccgtcgcccttcaccgtcactcgaacgccctcgtcgatgttttgccgcctgaggcggattctagcatctctcttcttagtcaatccgagaagcctgacgtctcctacaatgatattggaggatgtgatattcagaagcaggagattcgcgaggctgttgagttgccacttacccaccacgagctttacaaacagattggtattgacccaccacgaggtgtcttgctctatggacctcctgggactgggaagactatgttggctaaggctgttgctaatcacacaaccgctgctttcattagggttgttggctccgagtttgtgcagaagtacctcggcgagggacctcgtatggttcgtgatgtcttccgtcttgccaaggagaatgctccagctatcatctttattgatgaggtggatgccatcgctactgctaggttcgatgctcaaactggagctgatagggaagttcagcgtattctcatggaactacttaatcagatggatggatttgaccagaccgtgaatgtcaaggtcataatggcaaccaacagggcagacactcttgatcctgctctcttacgtcctgggagacttgatcgtaagattgagttcccccttcctgatagacgtcaaaagaggcttgttttccaggtatgcaccgccaaaatgaacctcagcgatgaggttgacttggaagactatgtttcacggcctgataaaattagcgctgctgagatagcagcaatctgccaggaagctggaatgcatgcggtgcgtaagaacagatatgtgatactgcccaaggatttcgagaagggttaccgctcgaatgtgaagaagccagacacggactttgagttctacaagtga

SEQ ID NO: 5859 - protein, 404 aa, Brassica napus
MAAAMVLDPKASPPLMDQSTTDEEDPYSRLKSLERQLEFTDIQEEYVKDEQKNLKRELLRAQEEVKRIQSVPLVIGQFMEMVDQNNGIVGSTTGSNYYVRILSTINREDLKPSASVALHRHSNALVDVLPPEADSSISLLSQSEKPDVSYNDIGGCDIQKQEIREAVELPLTHHELYKQIGIDPPRGVLLYGPPGTGKTMLAKAVANHTTAAFIRVVGSEFVQKYLGEGPRMVRDVFRLAKENAPAIIFIDEVDAIATARFDAQTGADREVQRILMELLNQMDGFDQTVNVKVIMATNRADTLDPALLRPGRLDRKIEFPLPDRRQKRLVFQVCTAKMNLSDEVDLEDYVSRPDKISAAEIAAICQEAGMHAVRKNRYVILPKDFEKGYRSNVKKPDTDFEFYK

SEQ ID NO: 5860 - DNA, 1200 bp, Brassica napus
  CDS (1)..(1200)
atgagcgacggagacgatgccgctagacgccgtaccgctgcagtggccgattaccggaaaaagctcctccaacataaggagctcgagtcccgagttcgaacagctagggagaacctgagaggatctaaaaaggaattcaacaaaactgaagatgatctcaagtctcttcaaagtgttggccagatcatcggagaagtccttcgacctctcgataatgaaagattgattgtcaaagcgagcagcggtcctcggtatgtggtaggctgccgtagcaaagtggataaggagaagctgacctcaggaactcgagttgttcttgatatgaccacacttactattatgagagcccttccccgagaagtcgatcccgttgtgtataacatgctgcacgaagaccctggcaacattagctactctgctgtgggaggattaggtgatcagatcagagaactcagggaatctattgagcttcctctcatgaatcctgaacttttcctccgagtaggaatcaaaccacccaagggagtccttctgtatggacctccaggtaccgggaaaactctgctagctagggctattgccagcaacatcgatgccaacttcttgaaggttgtgtcgagtgcaatcatagacaagtacattggagaaagtgctaggctgattcgggagatgtttaactatgcccgtgaacaccagccttgtatcattttcatggatgaaatcgatgcaatcggtgggcgtcgttttagcgagggaaccagtgctgatcgtgaaattcaaagaacacttatggagttgctcaatcagcttgatgggtttgacaacctcggaaaggtgaaaatgataatggcaacgaacagacctgatgtgcttgatcctgcgcttctccgtcctggtagattagatagaaagattgagatccctttgccaaatgagcaatcaagaatggatatcctcaagatccatgcagctggtatcgccaaacatggtgaaattgagtacgaggctattgtcaaacttgcagagggtttcaatggtgctgatctgcgtaacatatgcacggaggctggaatgtttgcaatccgagcagagcgggactatgtgatccaggaagatttcatgaaggcggtgagaaagctgagcgaggccaagaaacttgagtcgagttcacactacaatgcagatttcggaaaagagtga

SEQ ID NO: 5861 - protein, 399 aa, Brassica napus
MSDGDDAARRRTAAVADYRKKLLQHKELESRVRTARENLRGSKKEFNKTEDDLKSLQSVGQIIGEVLRPLDNERLIVKASSGPRYVVGCRSKVDKEKLTSGTRVVLDMTTLTIMRALPREVDPVVYNMLHEDPGNISYSAVGGLGDQIRELRESIELPLMNPELFLRVGIKPPKGVLLYGPPGTGKTLLARAIASNIDANFLKVVSSAIIDKYIGESARLIREMFNYAREHQPCIIFMDEIDAIGGRRFSEGTSADREIQRTLMELLNQLDGFDNLGKVKMIMATNRPDVLDPALLRPGRLDRKIEIPLPNEQSRMDILKIHAAGIAKHGEIEYEAIVKLAEGFNGADLRNICTEAGMFAIRAERDYVIQEDFMKAVRKLSEAKKLESSSHYNADFGKE

SEQ ID NO: 5862 - DNA, 1260 bp, Brassica napus
  CDS (1)..(1260)
atggcggccgtaggaatcgagacgaggcgtcctgagggtgcgatggaggaaacctgccacgtcaagggagcggtggcgaaacaaggagaggggcttaagcagtactatctccagcacatcgacgagctccagcgacttctccgccacaaaactaacaacctcaatcgcctcgaagctcagaggaacgatctcaactctcgagtacgaatgctgagagaagagttgcagctgcttcaggaacctgggtcctatgtgggtgaagtggtcaaagtgatgggaaaaaacaaggtcttggttaaggttcatccagaggggaagtatgttgttgatattgacaaaagtatagacataactaaacttaccccatctacaagagttgctctccgtaatgatagctatgttctccaccttgtcctgccaagtaaagttgatcccctggttaaccttatgaaagttgagaaggttcctgactccacttatgacatgattggtggtcttgaccagcaaattaaggaaattaaggaggtcattgagcttccaatcaagcatcctgaattgtttgagtctcttggaatcgctcagccaaagggtgtgttgttatatggtccacccggaactgggaagacacttttggctcgggctgtggcacatcacaccgactgtacgttcatcagagtttctggttccgagctggtccagaaatacattggagaaggttctagaatggtcagagaactttttgtgatggcaagggagcatgcaccatcaatcatcttcatggatgagatcgacagtatcgggtctgctcgtatggaatctggaagtggaaacggtgacagtgaggttcaacggactatgcttgagcttctcaatcaacttgacggattcgaagcatcaaacaaaatcaaggttctgatggcgacaaatcgtattgatattctggatcaagctcttctcaggccaggaaggattgataggaaaatcgaattccctaatcctaatgaagattcacgttgtgatatcttgaagattcactcgaggaaaatgaatttgatgcgtggaattgatctgaaaaagattgcagagaagatgaatggtgcttcaggtgctgaactgaaggctgtgtgcacggaggcgggcatgtttgctctgagggagaggagagtacacgtgacacaggaagactttgagatggcagtggcgaaggttatgaagaaagacacagagaagaacatgtctctgcgtaagctctggaagtag

SEQ ID NO: 5863 - protein, 419 aa, Brassica napus
MAAVGIETRRPEGAMEETCHVKGAVAKQGEGLKQYYLQHIDELQRLLRHKTNNLNRLEAQRNDLNSRVRMLREELQLLQEPGSYVGEVVKVMGKNKVLVKVHPEGKYVVDIDKSIDITKLTPSTRVALRNDSYVLHLVLPSKVDPLVNLMKVEKVPDSTYDMIGGLDQQIKEIKEVIELPIKHPELFESLGIAQPKGVLLYGPPGTGKTLLARAVAHHTDCTFIRVSGSELVQKYIGEGSRMVRELFVMAREHAPSIIFMDEIDSIGSARMESGSGNGDSEVQRTMLELLNQLDGFEASNKIKVLMATNRIDILDQALLRPGRIDRKIEFPNPNEDSRCDILKIHSRKMNLMRGIDLKKIAEKMNGASGAELKAVCTEAGMFALRERRVHVTQEDFEMAVAKVMKKDTEKNMSLRKLWK

SEQ ID NO: 5864 - DNA, 1275 bp, Brassica napus
  CDS (1)..(1275)
atggcaactccgatggtagaagacacgtcaagcttcgaagaggatcagctcgcgtccatgtccaccgaagatatcgtcagagctactcgcctcctcgagaacgagattcgaatcctcaaggaagacgcgcaaagaacaaatcttgaatgcgattcttacaaggagaagattaaagagaatcaggagaagattaaactcaacaagcagcttccttacttggttggcaacattgttgagatcttggagatgaatcccgaagatgatgctgaagaagacggtgctaatattgaccttgactctcaacggaaaggaaagtgtgttgtcttgaaaacctctacacgtcagactatctttctaccagttgttggtcttgtggaccctgatagcttgaagcctggggacttggttggagtaaataaagacagttaccttattttggataccttgccatcagagtatgactctagagttaaagccatggaggtcgatgagaaaccaaccgaagattacaatgacattggaggactggagaagcagatccaagagcttgtagaagctattgtgctccccatgacgcacaaggagcgtttcgagaagcttggtgttcgtccaccaaagggagtgctcctgtatggtcctccagggactggtaaaactctaatggctcgtgcttgtgcagcacagaccaatgccaccttcctcaaattggcaggccctcaattggtccagatgtttattggagacggagcaaaacttgtgcgtgatgcctttcaactagcgaaagagaaagctccatgcatcatcttcattgatgaaatcgatgcaattggtacaaagcgttttgacagtgaagtaagtggagacagggaagtgcaaaggactatgttggagctgctcaatcagcttgatggattcagtagcgatgagcgtattaaggtgattgcagcaactaaccgtgcagatattttggacccagcactcatgcgttctggtcgtctagacaggaagattgagttcccacatccaacagaagaagcaagagccagaatcttgcagattcactcgaggaagatgaatgtacacccagacgtcaactttgaggagcttgcaagatcgacggatgatttcaatggagctcagctgaaagcagtttgtgtagaggctggcatgttagccctccgtcgtgatgccactgaggtgaaccatgaggacttcaacgaaggtatcatccaagtccaggccaagaagaaagcaagcttgaactactacgcctaa

SEQ ID NO: 5865 - protein, 424 aa, Brassica napus
MATPMVEDTSSFEEDQLASMSTEDIVRATRLLENEIRILKEDAQRTNLECDSYKEKIKENQEKIKLNKQLPYLVGNIVEILEMNPEDDAEEDGANIDLDSQRKGKCVVLKTSTRQTIFLPVVGLVDPDSLKPGDLVGVNKDSYLILDTLPSEYDSRVKAMEVDEKPTEDYNDIGGLEKQIQELVEAIVLPMTHKERFEKLGVRPPKGVLLYGPPGTGKTLMARACAAQTNATFLKLAGPQLVQMFIGDGAKLVRDAFQLAKEKAPCIIFIDEIDAIGTKRFDSEVSGDREVQRTMLELLNQLDGFSSDERIKVIAATNRADILDPALMRSGRLDRKIEFPHPTEEARARILQIHSRKMNVHPDVNFEELARSTDDFNGAQLKAVCVEAGMLALRRDATEVNHEDFNEGIIQVQAKKKASLNYYA

SEQ ID NO: 5866 - DNA, 1332 bp, Brassica napus
  CDS (1)..(1332)
atgggtcaaggaccatccggaggtttgaatcgccaaggagacaagaagcccgatggcggcgataagaaagagaagaagttcgagccggcggctccgccgtcccgcgtcgggaggaagcagcgtcgccaaaaaggacccgaggcggcggcgaggctcccgacggtgactccttccactaagtgcaagctcaggctgctgaagatggagcggatcaaggactatctcctgatggaggaagagttcgtagcgaatcaggagaggctgaagcctcaggaggagaaggcggaggaagatagatctaaggtcgatgatctccgtgggacgccgatgagcgtcgggaacctcgaggagctgatcgatgagaatcacgcaatcgtttcgtcttccgtggggcctgagtattacgttgggatcttgtcgttcgttgataaagatcagctcgagcctgggtgctcgatcttgatgcataataaggttctgtctgttgttgggatactgcaagatgaagtggatccgatggtgtctgtgatgaaagttgagaaggcgcctttggagtcgtatgctgatattggaggtttagaagctcagattcaggagattaaggaagctgttgagttgcctttgactcatcctgagttgtatgaggatattggtattaagcctcccaagggtgtgattttgtatggtgagcctggaactgggaagactctgcttgctaaggcggtggcgaactctacatcagctactttcttgagagttgttggtagtgaactgattcagaagtatttgggagatggtcccaagcttgtgagggagcttttcagagttgctgatgacctttcaccatcaatcgtcttcatagacgagattgatgctgttggtaccaagcggtatgatgctaactcaggaggtgagcgtgagatccaaagaactatgttggaacttctgaaccagcttgatgggtttgattcaagaggagacgtaaaggtcatccttgcaacaaacagaatcgagagtcttgacccggcacttcttcgacctggacgtattgataggaagatcgagttcccacttccagatatcaaaacgagaagacgcatcttccagatacacacatcaaagatgactctgtcggaagatgtaaacttggaagagtttgtgatgacaaaagacgagttctcaggagctgatatcaaagctatttgcactgaggctggtctgcttgcgctcagggagcgtcgtatgaaggtgacgcatccggatttcaagaaagccaaggaaaaggttatgttcaagaagaaagaaggcgtccctgaaggcctttacatgtaa

SEQ ID NO: 5867 - protein, 443 aa, Brassica napus
MGQGPSGGLNRQGDKKPDGGDKKEKKFEPAAPPSRVGRKQRRQKGPEAAARLPTVTPSTKCKLRLLKMERIKDYLLMEEEFVANQERLKPQEEKAEEDRSKVDDLRGTPMSVGNLEELIDENHAIVSSSVGPEYYVGILSFVDKDQLEPGCSILMHNKVLSVVGILQDEVDPMVSVMKVEKAPLESYADIGGLEAQIQEIKEAVELPLTHPELYEDIGIKPPKGVILYGEPGTGKTLLAKAVANSTSATFLRVVGSELIQKYLGDGPKLVRELFRVADDLSPSIVFIDEIDAVGTKRYDANSGGEREIQRTMLELLNQLDGFDSRGDVKVILATNRIESLDPALLRPGRIDRKIEFPLPDIKTRRRIFQIHTSKMTLSEDVNLEEFVMTKDEFSGADIKAICTEAGLLALRERRMKVTHPDFKKAKEKVMFKKKEGVPEGLYM

SEQ ID NO: 5868 - DNA, 1251 bp, Brassica napus
  CDS (1)..(1251)
atggcggccgtaggaatcgagacgaggcgtcctgagggtgcgatggaggaaacctgcaacgtgaagggagcacaaggagaggggcttaagcagtactatctccagcacatcgacgagctccagcgacttctccgccagaaaactaacaacctcaatcgcctcgaagctcagaggaacgatctcaactctcgagtacgaatgctgagagaagagttgcagctgcttcaggaacctgggtcctatgtgggtgaagtggtcaaagttatgggaaaaaacaaggtcttggttaaggttcatccagaggggaagtatgttgttgatattgacaaaagtatagacataactaaacttaccccatctacaagagttgctctccgtaatgatagctatgttctccaccttgtcctgccaagtaaagttgatcccctggttaaccttatgaaagttgagaaggttcctgactccacttatgacatgattggtggtcttgaccagcaaattaaggaaattaaggaggtcattgagcttccaatcaagcatcctgaattgtttgagtctcttggaattgctcagccaaagggtgtgttgttatatggtccacccggaactgggaagacacttttggctcgggctgtggcacatcacaccgactgtacgttcatcagagtttctggttccgagctggtccagaaatacattggagaaggttctagaatggtcagagaactctttgtgatggcaagggagcatgcaccatcaatcatcttcatggatgaaatcgacagtattgggtctgctcgtatggaatctggaagtggaaacggtgacagtgaggttcaacggactatgcttgagcttctcaatcaacttgacggattcgaagcgtcaaacaaaatcaaggttctgatggcgacaaatcgtattgatattctggatcaagctcttctcaggccaggaaggattgataggaaaatcgaattccctaatcctaatgaagattcacgttgtgatatcttgaagattcactcgaggaaaatgaatttgatgcgtggaattgatctgaaaaagattgcagagaagatgaatggtgcttcaggtgctgaactgaaggctgtgtgcacggaggcgggcatgtttgctctgagggagaggagagtacacgtgacacaggaagactttgaaatggcagtggcgaaggtaatgaagaaagacacagagaagaacatgtctctgcgtaagctctggaagtag

SEQ ID NO: 5869 - protein, 416 aa, Brassica napus
MAAVGIETRRPEGAMEETCNVKGAQGEGLKQYYLQHIDELQRLLRQKTNNLNRLEAQRNDLNSRVRMLREELQLLQEPGSYVGEVVKVMGKNKVLVKVHPEGKYVVDIDKSIDITKLTPSTRVALRNDSYVLHLVLPSKVDPLVNLMKVEKVPDSTYDMIGGLDQQIKEIKEVIELPIKHPELFESLGIAQPKGVLLYGPPGTGKTLLARAVAHHTDCTFIRVSGSELVQKYIGEGSRMVRELFVMAREHAPSIIFMDEIDSIGSARMESGSGNGDSEVQRTMLELLNQLDGFEASNKIKVLMATNRIDILDQALLRPGRIDRKIEFPNPNEDSRCDILKIHSRKMNLMRGIDLKKIAEKMNGASGAELKAVCTEAGMFALRERRVHVTQEDFEMAVAKVMKKDTEKNMSLRKLWK

SEQ ID NO: 5870 - DNA, 1278 bp, Glycine max
  CDS (1)..(1278)
atggcgagcgccatgttaggggatgctaccacgagctttgaagatggtaagttggcgtctatgaccaccgatgacgtcgtcagagcctctcgtattctcgaaaacgatattcgcattctcaaggaagaggtgcagagatcgaatcgggaatgggaatcgtacaaggagaagatacaagataatgaggagaaagttaaacttaataagcaattgccctacctcgttggtaacattgttgagatattggaaataaatccagaagatgaagcagaagaagatggttccaacattgatcttgactcccaaaggaaaggaaaatgtgttgtgctaaagacatctactcgacagacaatctttcttcctgttgttgggcttgttgaccctgccaagttaaaacctggtgatctggttggtgttaacaaagatagttacttaatcttggatgccctgccttctgagtatgattcacgagttaaggccatggaagttgatgaaaagccaaccgaggactacaatgacattggtggattagagaagcagattcaagaattagttgaagccattgttttgcccatgacccacaaggagcggttccaaaagttaggagttcgtcctcccaagggagtgctgttgtatggacctccggggactgggaaaacattgatggctcgtgcctgtgcagcacagacaaatgccacttttctgaaattggcaggccctcaactggtccagatgttcataggagatggagcaaaacttgttcgtgatgcctttcaactagcaaaagagaagtcaccatgcattatttttatagatgaaattgatgcaattggtacaaagcgttttgatagtgaagtaagtggagacagagaggtacaacgaactatgttagaattgcttaatcagcttgatggttttagcagtgatgaccggatcaaggtgatagcagcaactaaccgtgcagatattcttgatcctgccctgatgcgttctggtcgtttggatcgtaaaattgagtttccacacccaagtgaagaagcaagagctcgaattctacagattcattcaaggaagatgaatgttcacccagatgtcaactttgaagaacttgcccggtccacagatgatttcaatggcgcacaactgaaggctgtctgtgttgaggctggcatgttggctctacgccgtgatgcaactgaggtgaaccacgaggattttaatgaaggtattattcaagtccaagcaaagaagaaagcaagtctgaactattatgcatag

SEQ ID NO: 5871 - protein, 425 aa, Glycine max
MASAMLGDATTSFEDGKLASMTTDDVVRASRILENDIRILKEEVQRSNREWESYKEKIQDNEEKVKLNKQLPYLVGNIVEILEINPEDEAEEDGSNIDLDSQRKGKCVVLKTSTRQTIFLPVVGLVDPAKLKPGDLVGVNKDSYLILDALPSEYDSRVKAMEVDEKPTEDYNDIGGLEKQIQELVEAIVLPMTHKERFQKLGVRPPKGVLLYGPPGTGKTLMARACAAQTNATFLKLAGPQLVQMFIGDGAKLVRDAFQLAKEKSPCIIFIDEIDAIGTKRFDSEVSGDREVQRTMLELLNQLDGFSSDDRIKVIAATNRADILDPALMRSGRLDRKIEFPHPSEEARARILQIHSRKMNVHPDVNFEELARSTDDFNGAQLKAVCVEAGMLALRRDATEVNHEDFNEGIIQVQAKKKASLNYYA

SEQ ID NO: 5872 - DNA, 1269 bp, Glycine max
  CDS (1)..(1269)
atgggctcctccgcgatggtgttggacccgaaaccctcatcggagcctccgccgttcctcccgtcgacgaaatcggactaccttcaaggcagcttcggcggcgacgccaccgcctccgacgaggacgacctctacagccgcctgaaatccctccagcgccagctggagttcatcgacatccaggaggagtacgtgaaggatgagcagaagaatctcaagcgcgagctgctccgagcgcaggaggaggtgaagcggatacagtcggtgccgctcgtcattggccagttcatggagatggttgaccagaacaacggcatcgtcggatccaccaccggatccaactactacgtcaggatcctcagtaccatcaaccgcgagcttctcaagccctccgcctccgtcgcactccaccgccactccaacgcgctcgtcgacgttcttccgccggaggccgactccagcatctcgctcctcagccagtccgagaagcctgacgtcacttataatgacattggaggatgtgatatacagaaacaggaaatccgtgaggctgtggagctaccccttacacatcatgaactatacaaacaaattggtattgatcctccccgtggtgttttactgtatggaccccctggcactggcaaaacaatgcttgccaaagctgttgcgaatcataccactgctgctttcatcagggttgtgggatctgagtttgtgcagaagtatcttggtgagggtccacgaatggtccgtgatgtatttcgtcttgctaaagagaatgcccctgcaattatatttattgatgaggttgatgcaatagccactgctagatttgatgcccaaactggagctgatagagaagtacagcgtatccttatggaacttttgaatcagatggatggttttgaccaaacggtaaatgttaaagttataatggcaactaacagagcagacaccttggaccctgctctgttgcgtcctggaaggcttgatcgtaaaattgagttccctttgcctgatagacgccaaaagaggctcgtatttcaggtttgcacagccaaaatgaacttgagtgatgaggtagacctagaggattatgtttctcgtcctgacaaaatcagtgctgctgagatagcagccatttgtcaagaagctggaatgcatgctgttcgcaagaatagatatgtcatactgccgaaggacttcgagaagggttacaggacaaacgtgaagaagcctgatactgactttgaattttacaagtga

SEQ ID NO: 5873 - protein, 422 aa, Glycine max
MGSSAMVLDPKPSSEPPPFLPSTKSDYLQGSFGGDATASDEDDLYSRLKSLQRQLEFIDIQEEYVKDEQKNLKRELLRAQEEVKRIQSVPLVIGQFMEMVDQNNGIVGSTTGSNYYVRILSTINRELLKPSASVALHRHSNALVDVLPPEADSSISLLSQSEKPDVTYNDIGGCDIQKQEIREAVELPLTHHELYKQIGIDPPRGVLLYGPPGTGKTMLAKAVANHTTAAFIRVVGSEFVQKYLGEGPRMVRDVFRLAKENAPAIIFIDEVDAIATARFDAQTGADREVQRILMELLNQMDGFDQTVNVKVIMATNRADTLDPALLRPGRLDRKIEFPLPDRRQKRLVFQVCTAKMNLSDEVDLEDYVSRPDKISAAEIAAICQEAGMHAVRKNRYVILPKDFEKGYRTNVKKPDTDFEFYK

SEQ ID NO: 5874 - DNA, 1200 bp, Glycine max
  CDS (1)..(1200)
atgacggatgctgctgaagacgctacacgccgccgtaatgcggtggccgagtaccgcaagaagcttcttcaacacaaggaattggagtccagagtacgatccgtccgagagaatttgcgtgcctcaaagaaagagttcaacaaaactgaagatgatctgaagtctcttcaaagcgttggacagatcattggcgaagttcttaggcctctcgacaatgaacgcttgattgttaaggcaagcagcggacctaggtatgtggttggctgccgcagtaaagtagataaggaaaaactgactgctggtacgagagtcgttcttgatatgacgacgctcaccataatgcgggctcttccacgtgaagttgatccagtagtttacaatatgctgcatgaggatcctggtaatatcagttactctgctgttggtggcttatccgatcagataagggaattgagggagtcaattgaactgcctctgatgaatcctgagctcttccttcgagttggaattaaacctccaaagggtgttctcctttacgggcctcctggtactggtaaaacattgttagctagggcaattgcaagtaatatagatgcaaatttcctaaaggttgtttcaagtgccataattgataagtacattggagaaagtgccaggttaatcagagagatgtttggttatgcacgtgatcaccagccttgcatcatttttatggatgagatcgatgccattggtggtcgccgtttcagtgagggaacaagtgcagatcgtgagattcagagaacgctaatggagttgcttaatcaacttgatggatttgatcaacttggaaaggttaaaatgataatggcaacaaaccgtcctgatgtactggatcctgctcttctgcgtcctggaagattagatagaaaaatagaaatccctctgcctaatgaacaatcaaggatggaaattcttaagattcatgctgctggaattgccaagcatggtgaaatagactatgaagctgttgtgaagcttgcaaagggatttaatggggcggatcttccaaatgtgtgcacaaaaactggaatggcaccaattcgtccagagcgggattatgtgatccatgaaaattttatgaaggctgttaggaaactgaacgaggcaaaaaaacttgaatccagggcgcaccacagtgctgattttggtaaaaactaa

SEQ ID NO: 5875 - protein, 399 aa, Glycine max
MTDAAEDATRRRNAVAEYRKKLLQHKELESRVRSVRENLRASKKEFNKTEDDLKSLQSVGQIIGEVLRPLDNERLIVKASSGPRYVVGCRSKVDKEKLTAGTRVVLDMTTLTIMRALPREVDPVVYNMLHEDPGNISYSAVGGLSDQIRELRESIELPLMNPELFLRVGIKPPKGVLLYGPPGTGKTLLARAIASNIDANFLKVVSSAIIDKYIGESARLIREMFGYARDHQPCIIFMDEIDAIGGRRFSEGTSADREIQRTLMELLNQLDGFDQLGKVKMIMATNRPDVLDPALLRPGRLDRKIEIPLPNEQSRMEILKIHAAGIAKHGEIDYEAVVKLAKGFNGADLPNVCTKTGMAPIRPERDYVIHENFMKAVRKLNEAKKLESRAHHSADFGKN

SEQ ID NO: 5876 - DNA, 1272 bp, Glycine max
  CDS (1)..(1272)
atggcgagcgcgatggttgaggacgccaacttcgaagatgaccagctcgccaatatgaccaccgacgacgtcgtcagagcttctcgtcttctcgacaacgagattcgcatcctcaaagaagagttgcagaggaccaatttggagttggaatcgtacaaggacaagatcaaggagaatcaggagaagattaagctcaataagcagttgccctacctcgttgggaacatcgttgagatattggaaatgaacccagaagacgaagctgaagaagatggtgccaatattgatcttgactcacaaaggaagggaaagtgtgttgtgctaaagacttctactcgacagacaatctttctacctgttgttgggcttgttgaccctgacaagttaaaacctggtgatctggttggtgttaacaaggatagttacttaatcttggataccttgccttctgagtatgattctagagttaaggccatggaagttgatgaaaagccaaccgaggactacaatgacattggtggattagagaagcagattcaagaattagttgaagctattgttttgccaatgacctacaaggagcggttccaaaaattaggagttcgtccaccgaagggagtgctcttatatggacctccaggaactggaaaaacactaattgcccgtgcttgtgcagcacaaacaaatgccacttttctgaagttggcaggtccacagctggtccagatgtttataggagacggagcaaaacttgtccaggatgcctttcagctggcaaaagagaagtctccatgcattatatttatagatgaaattgatgcaattggaacaaagcgtttcgatagtgaagtaagtggagacagggaggtacagcgaacaatgttagaattgctcaatcaccttgatggttttagtagtgatgaccacattaaggtgattgcagcaacaaaccgtgctgacattcttgatcctgcccttatgcgttctggtcgattggatcgaaaaattgagttcccacacccaactgaagaagcaagagcccgaattctacagatccattctcggaaaatgaatgttcaccccgatgtcaactttgaagaattagctcggtccacagatgatttcaatgcagcacaacttaaagctgtctgtgttgaggctggcatgttggcccttcgccgtgatgcaactgaggtgaaccatgaggactttaatgaaggcatcatccaagtccaagcaaagaagaaagcaagcttgaattattatgcatag

SEQ ID NO: 5877 - protein, 423 aa, Glycine max
MASAMVEDANFEDDQLANMTTDDVVRASRLLDNEIRILKEELQRTNLELESYKDKIKENQEKIKLNKQLPYLVGNIVEILEMNPEDEAEEDGANIDLDSQRKGKCVVLKTSTRQTIFLPVVGLVDPDKLKPGDLVGVNKDSYLILDTLPSEYDSRVKAMEVDEKPTEDYNDIGGLEKQIQELVEAIVLPMTYKERFQKLGVRPPKGVLLYGPPGTGKTLIARACAAQTNATFLKLAGPQLVQMFIGDGAKLVQDAFQLAKEKSPCIIFIDEIDAIGTKRFDSEVSGDREVQRTMLELLNHLDGFSSDDHIKVIAATNRADILDPALMRSGRLDRKIEFPHPTEEARARILQIHSRKMNVHPDVNFEELARSTDDFNAAQLKAVCVEAGMLALRRDATEVNHEDFNEGIIQVQAKKKASLNYYA

SEQ ID NO: 5878 - DNA, 1200 bp, Glycine max
  CDS (1)..(1200)
atgacggatgctgctgaagacgctacacgccgccgtaatgcggtggccgagtaccgcaagaagcttcttcaacacaaggaattggagtccagagtacgatccgtccgagagaatttgcgtgcctcaaagaaagagttcaacaaaactgaagatgatctgaagtctcttcaaagcgttggacagatcattggcgaagttcttaggcctctcgacaatgaacgcttgattgttaaggcaagcagcggacctaggtatgtggttggctgccgcagtaaagtagataaggaaaaactgactgctggtacgagagtcgttcttgatatgacgacgctcaccataatgcgggctcttccacgtgaagttgatccagtagtttacaatatgctgcatgaggatcctggtaatatcagttactctgctgttggtggcttatccgatcagataagggaattgagggagtcaattgaactgcctctgatgaatcctgagctcttccttcgagttggaattaaacctccaaagggtgttctcctttacgggcctcctggtactggtaaaacattgttagctagggcaattgcaagtaatatagatgcaaatttcctaaaggttgtttcaagtgccataattgataagtacattggagaaagtgccaggttaatcagagagatgtttggttatgcacgtgatcaccagccttgcatcatttttatggatgagatcgatgccattggtggtcgccgtttcagtgagggaacaagtgcagatcgtgagattcagagaacgctaatggagttgcttaatcaacttgatggatttgatcaacttggaaaggttaaaatgataatggcaacaaaccgtcctgatgtactggatcctgctcttctgcgtcctggaagattagatagaaaaatagaaatccctctgcctaatgaacaatcaaggatggaaattcttaagattcatgctgctggaattgccaagcatggtgaaatagactatgaagctgttgtgaagcttgcggagggatttaatggggctgatcttcgaaatgtgtgcacagaagctggaatggcagcaattcgtgcagagcgtgattatgtgatccatgaagattttatgaaggctgttaggaaactgaacgaggcaaagaaacttgaatccagtgcgcactacagtgctgattttggtaaagactag

SEQ ID NO: 5879 - protein, 399 aa, Glycine max
MTDAAEDATRRRNAVAEYRKKLLQHKELESRVRSVRENLRASKKEFNKTEDDLKSLQSVGQIIGEVLRPLDNERLIVKASSGPRYVVGCRSKVDKEKLTAGTRVVLDMTTLTIMRALPREVDPVVYNMLHEDPGNISYSAVGGLSDQIRELRESIELPLMNPELFLRVGIKPPKGVLLYGPPGTGKTLLARAIASNIDANFLKVVSSAIIDKYIGESARLIREMFGYARDHQPCIIFMDEIDAIGGRRFSEGTSADREIQRTLMELLNQLDGFDQLGKVKMIMATNRPDVLDPALLRPGRLDRKIEIPLPNEQSRMEILKIHAAGIAKHGEIDYEAVVKLAEGFNGADLRNVCTEAGMAAIRAERDYVIHEDFMKAVRKLNEAKKLESSAHYSADFGKD

SEQ ID NO: 5880 - DNA, 1350 bp, Hordeum vulgare
  CDS (1)..(1350)
atggggcagggcacgccgggcggcatggacaagccgggcggagccccggacgaccgcaacaagacaggcggcgacggcgacaagaaggacaagaagttcgagccccccgccgcgccctcccgcgtcggccgcaagcagcgccgccagaaggggcccgaggcggccgcccgcctccccaacgtcgcgccgctctccaagtgccgcctccgcctcctcaagctcgaccgcgtcaaggactacctcctcatggaggaggagttcgtcgccgcgcaggagcgcctccgccccacagaggagaagacggaggaggaccgctccaaggtcgacgacctacgcggcacccccatgagcgtcggctccctcgaggagatcatcgacgagagccacgccatcgtctcctcctccgtcggcccagagtactacgtcggcatactctccttcgtcgacaaggaccagctcgagcccggctgctccatcctcatgcacaacaaggttctctctgtggttggaattctacaagacgaggttgatcctatggtgtctgtgatgaaagttgagaaagctccgctggaatcatatgcggacattggtgggttagatgctcagattcaagaaataaaagaggcggttgagcttccgctgacccaccctgagctatatgaagacattggaataaggccacccaagggggtcatattatatggagaacctggaacggggaaaactctacttgccaaggctgttgctaactccacatctgcaactttcttacgtgttgttggaagtgaacttattcagaagtaccttggcgacggtccaaaactagttagagaactatttagagttgcggatgagctttccccctcaatagtcttcatagatgagatcgatgcagttggaacaaagaggtatgacgctcattcaggaggggagcgtgagattcagagaactatgttggagctgctgaaccagctagatggttttgactcacgtggagatgttaaagttattctagctacaaatcgcattgaaagtcttgatccagccttgcttcgccctggcagaatagaccgaaagatagaattccctcttccagacattaagactaggcggcgcatcttccagatacacacggcaaagatgacattgtcagatgatgtgaacctggaagagttcgtcatgactaaggatgagttttctggtgctgacatcaaagcaatatgcaccgaatctggcttgcttgctttgagagagcgcaggatgaaggtgacacacgccgacttcaagaaggcaaaggagaaggtcatgttcaagaagaaggaaggtgtgccggaggggctttacatgtga

SEQ ID NO: 5881 - protein, 449 aa, Hordeum vulgare
MGQGTPGGMDKPGGAPDDRNKTGGDGDKKDKKFEPPAAPSRVGRKQRRQKGPEAAARLPNVAPLSKCRLRLLKLDRVKDYLLMEEEFVAAQERLRPTEEKTEEDRSKVDDLRGTPMSVGSLEEIIDESHAIVSSSVGPEYYVGILSFVDKDQLEPGCSILMHNKVLSVVGILQDEVDPMVSVMKVEKAPLESYADIGGLDAQIQEIKEAVELPLTHPELYEDIGIRPPKGVILYGEPGTGKTLLAKAVANSTSATFLRVVGSELIQKYLGDGPKLVRELFRVADELSPSIVFIDEIDAVGTKRYDAHSGGEREIQRTMLELLNQLDGFDSRGDVKVILATNRIESLDPALLRPGRIDRKIEFPLPDIKTRRRIFQIHTAKMTLSDDVNLEEFVMTKDEFSGADIKAICTESGLLALRERRMKVTHADFKKAKEKVMFKKKEGVPEGLYM

SEQ ID NO: 5882 - DNA, 1257 bp, Hordeum vulgare
  CDS (1)..(1257)
atggcgacggtggcgatggacatctcgaagcccccgccggccgcgtccggcgacgagtcggccaagggcgcgcgtggcggaggggaggggctgcggcagtactacctgcagcacatccacgacctgcagctccagatccgcaacaagacccacaacctcaaccgcctcgaggcccagcgcaacgacctcaactcccgagttagaatgctcagggaagagctacagctgctccaagaaccgggctcatatgttggcgaggtggtgaaggtcatgggcaaatcaaaggttctagtcaaggtgcatccagaaggcaaatatgtagtagatattgataaaagcatcgatattacaaaaataacaccttcaacaagagttgctcttcggaacgacagctacatgcttcatttggttctaccaagcaaagttgatccactggtcaaccttatgaaagttgagaaggtcccggattccacgtatgatatgattggaggtcttgatcagcaaatcaaggagatcaaagaggtcattgagcttcccatcaaacatcctgagctattcgagagcctcggaattgcccaaccaaagggcgtcctcctatacggaccaccagggacaggcaaaacattacttgctcgtgcagttgctcatcacaccgactgcaccttcatcagggtgtcaggttctgagttggttcagaagtatattggagagggttcccggatggtccgtgaactctttgtgatggctagggagcatgcaccatccattatattcatggatgaaatagactccattggatctgctagaatggagtcaggaaccggcaacggtgatagcgaagtgcaacggaccatgcttgagctgctaaaccaacttgatggttttgaagcatcaaacaaaattaaggttctgatggcaacaaacaggatagacatattggatcaagcccttctaaggcctggccgcatagacaggaagatcgaatttccaaatcctaatgaggattcacgaggtgacatcttgaagattcattcaaggaggatgaacttgatgcgtggaattgatctgaaaaagattgcgggaaagatgaatggcgcttcaggagctgagctaaaggcggtgtgcaccgaagccggaatgtttgctctccgcgagagaagggtgcacgtaacgcaggaggactttgagatggcggtggccaaggtgatgaagaaggacaatgagaagaacatgtccttgcggaagctgtggaagtga

SEQ ID NO: 5883 - protein, 418 aa, Hordeum vulgare
MATVAMDISKPPPAASGDESAKGARGGGEGLRQYYLQHIHDLQLQIRNKTHNLNRLEAQRNDLNSRVRMLREELQLLQEPGSYVGEVVKVMGKSKVLVKVHPEGKYVVDIDKSIDITKITPSTRVALRNDSYMLHLVLPSKVDPLVNLMKVEKVPDSTYDMIGGLDQQIKEIKEVIELPIKHPELFESLGIAQPKGVLLYGPPGTGKTLLARAVAHHTDCTFIRVSGSELVQKYIGEGSRMVRELFVMAREHAPSIIFMDEIDSIGSARMESGTGNGDSEVQRTMLELLNQLDGFEASNKIKVLMATNRIDILDQALLRPGRIDRKIEFPNPNEDSRGDILKIHSRRMNLMRGIDLKKIAGKMNGASGAELKAVCTEAGMFALRERRVHVTQEDFEMAVAKVMKKDNEKNMSLRKLWK

SEQ ID NO: 5884 - DNA, 1233 bp, Hordeum vulgare
  CDS (1)..(1233)
atgtcggccgcggccgtcgcgccgagcccgccggcggccccgccgtcctaccccgcggcgccctccgccccctccgctgaggatgacgacgacctctacggccgcctcaagtcgctgcagcgccacatggagttcgtcgagatccaggaggagtacgtcaaggacgagcagaagaaccttaagcgcgagctgctgcgcgcgcaggaggaggtcaagcggatccagtcggtgcccctcgtcatcggccagttcatggagatggtcgacggcaacaacggcatcgtcggatccaccaccggcagcaactactacgtgcgcatcctcagcaccatcaaccgcgagctgctcaagccctccgcctccgtcgccctgcaccgccactccaacgccctcgtcgacgtgctgccccccgaggccgactccagcatctcgctcctcgcctcctccgagaaacccaacgtcctatactcggacattggaggatgtgatatccaaaaacaagaaattcgcgaggcagttgagctaccattgacacaccatgaattgtacaagcagattggtattgatcctccaagaggggtgctgctctatggtcctccaggcactggcaagaccatgcttgctaaagctgtggcacatcacacaactgctgcttttatcagagtggttggttcagaatttgtgcagaagtacctgggtgagggcccaaggatgggtcgagatgtattccgcttagctaaagagaatgccccagctataataatcattgatgagggtgatgctatagccactgctcgattcgatgctcagaccggggctgaccgagaagttcagcgtattctgatggaactactgaatcagatggatggatttgatcagacagtgaatgtgaaggttataatggcaaccaatcgggcagatactctagatcctgctctgctgcgtccaggaagactggacaggaaaattgagttccctctgccggatcggaggcagaagaggcttgttttccaagtttgtactgctaagatgaacttgagtgatgaggttgatttggaagattatgtctccagacctgataaaatcagtgctgctgatatcactgctatttgccaggaagctggcatgcatgctgtccgcaaaaatcggtatgttatcctccccaaggacttcgagaagggttaccgaaccaacgtcaagaagcctgagtcagactttgacttctacaaatga

SEQ ID NO: 5885 - protein, 410 aa, Hordeum vulgare
MSAAAVAPSPPAAPPSYPAAPSAPSAEDDDDLYGRLKSLQRHMEFVEIQEEYVKDEQKNLKRELLRAQEEVKRIQSVPLVIGQFMEMVDGNNGIVGSTTGSNYYVRILSTINRELLKPSASVALHRHSNALVDVLPPEADSSISLLASSEKPNVLYSDIGGCDIQKQEIREAVELPLTHHELYKQIGIDPPRGVLLYGPPGTGKTMLAKAVAHHTTAAFIRVVGSEFVQKYLGEGPRMGRDVFRLAKENAPAIIIIDEGDAIATARFDAQTGADREVQRILMELLNQMDGFDQTVNVKVIMATNRADTLDPALLRPGRLDRKIEFPLPDRRQKRLVFQVCTAKMNLSDEVDLEDYVSRPDKISAADITAICQEAGMHAVRKNRYVILPKDFEKGYRTNVKKPESDFDFYK

SEQ ID NO: 5886 - DNA, 1281 bp, Hordeum vulgare
  CDS (1)..(1281)
atggcgccggagccagaagacgatctcatgagcgagaagaaccccaggcctctcgacgaggacgacatcgccctcctcaagacctacgggcttggaccctactcgaacagcatcaagaaggtcgagaaggatataaaggagatggccaagaagatcaacgacctgtgcgggataaaggagtctgatactggattggctccaccaagtcagtgggatcttgtatcagataaacagatgatgcaagaggagcagccactgcaggttgctagatgcacgaagattataagtcccaataccgatgatgccaaatatgtcatcaatgttaaacaaatcgcaaagtttgtggtcggcttaggtgataaagtttcccccactgatatcgaggaagggatgagagttggggttgatcgaaacaagtaccagatacaaatccctttgccacccaagattgatcctagtgttacaatgatgacagttgaagaaaagccggatgggacatataatgatgttggtggctgtaaggatcagattgagaagatgcgggaggttgtggagcttcctatgctccatcccgagaagtttgtcaagctgggtattgatcctccaaagggagtactttgctatggccctccaggaactggaaagacacttcttgccagggcagtggctaatcgcacagacgcatgttttatccgcgtgataggaagcgagttagttcagaagtatgttggtgaaggggcaaggatggttcgtgaactcttccagatggctcggtcaaagaaggcatgcattgtcttctttgacgaggttgatgccattggtggtgctcgctttgacgacggtgctggtggtgacaacgaggtccagcgcaccatgctcgagattgtcaatcagctggatggttttgatgcgagaggaaacatcaaggtcctcatggctaccaacaggcctgatacgttggacccggcactgttgcgtccagggcggctggacaggaaggtcgagtttggcttgcctgatctggagggccgcacccagatcttcaagatccacacccgcgcgatgaactgcgagcgggacatccggtttgagctgctggctcgcctctgccccaactccactggtgccgatatccggagtgtgtgcacagaggctggcatgtacgctatccgcgcgcggaggaaaactgtcacggagaaggatttcttggacgcagtcaacaaggtcattaaaggttatcaaaagttcagcgccacgccgaagtacatggtctataactag

SEQ ID NO: 5887 - protein, 426 aa, Hordeum vulgare
MAPEPEDDLMSEKNPRPLDEDDIALLKTYGLGPYSNSIKKVEKDIKEMAKKINDLCGIKESDTGLAPPSQWDLVSDKQMMQEEQPLQVARCTKIISPNTDDAKYVINVKQIAKFVVGLGDKVSPTDIEEGMRVGVDRNKYQIQIPLPPKIDPSVTMMTVEEKPDGTYNDVGGCKDQIEKMREVVELPMLHPEKFVKLGIDPPKGVLCYGPPGTGKTLLARAVANRTDACFIRVIGSELVQKYVGEGARMVRELFQMARSKKACIVFFDEVDAIGGARFDDGAGGDNEVQRTMLEIVNQLDGFDARGNIKVLMATNRPDTLDPALLRPGRLDRKVEFGLPDLEGRTQIFKIHTRAMNCERDIRFELLARLCPNSTGADIRSVCTEAGMYAIRARRKTVTEKDFLDAVNKVIKGYQKFSATPKYMVYN

SEQ ID NO: 5888 - DNA, 1281 bp, Hordeum vulgare
  CDS (1)..(1281)
atggcgccggagccggaggacgacatcatggcggagaagaacccgcgccccctcgacgaggacgacatcgccctcctcaagacctacgggcttgggccatactccacgagcatcaagacggccgagaaggagatcaaggagttggccaagaggatcaatgacctttgtgggataaaggagtctgatactgggctagctccacctagccagtgggatctagtgtcagacaaacagatgatgcaggaggagcagccactgcaagtagcaaggtgcaccaagattataaaccctaataccgacgatgccaaatacatgatcaatgtaaaacaaattgcaaagtttgttgttggattgggtgataaagtttccccaactgatattgaggaagggatgagagtcggtgttgatcggaacaagtaccagattcagattccgttgccaccgaagattgaccccagcgtcactatgatgacggttgaggagaaaccagatgtcacgtataatgatgttggcgggtgtaaggagcagattgaaaaaatgcgtgaggttgtcgagctccccatgcttcacccagagaagtttgtgaagcttggtattgatcctcctaaaggtgtcctttgctacggtcctcctggcactggcaagactcttcttgctagagctgttgccaataggacggatgcttgttttatccgtgttattggaagcgaattagttcagaagtatgttggtgaaggcgctcggatggttagggagttatttcagatggctcgctcgaagaaagcatgcatcatattcttcgatgaagttgatgccattggtggtgctcgctttgatgatggagctgggggcgataatgaggttcagcgtactatgcttgaaatcgtcaatcagcttgacggttttgatgctagggggaatatcaaggttctcatggccaccaacaggcctgatacactggaccctgcacttctacgtcctggtcgcctggaccgaaagatggaatttggcttacctgacttggaaggccgtacccagatattcaaaatacatacacgcacaatgaactgtgagcgtgatatccgattcgagctactggcgcgactctgccccaacgccaccggtgcggacatcaggagtgtctgcacagaagccggcatgtacgccatccgtgcccgcaggaagactgtgacggagaaggatttcctcgactcggtcaacaaggttatcaaggggtatcagaaattcagcgcaaccccgaaatacatggtgtacaattga

SEQ ID NO: 5889 - protein, 426 aa, Hordeum vulgare
MAPEPEDDIMAEKNPRPLDEDDIALLKTYGLGPYSTSIKTAEKEIKELAKRINDLCGIKESDTGLAPPSQWDLVSDKQMMQEEQPLQVARCTKIINPNTDDAKYMINVKQIAKFVVGLGDKVSPTDIEEGMRVGVDRNKYQIQIPLPPKIDPSVTMMTVEEKPDVTYNDVGGCKEQIEKMREVVELPMLHPEKFVKLGIDPPKGVLCYGPPGTGKTLLARAVANRTDACFIRVIGSELVQKYVGEGARMVRELFQMARSKKACIIFFDEVDAIGGARFDDGAGGDNEVQRTMLEIVNQLDGFDARGNIKVLMATNRPDTLDPALLRPGRLDRKMEFGLPDLEGRTQIFKIHTRTMNCERDIRFELLARLCPNATGADIRSVCTEAGMYAIRARRKTVTEKDFLDSVNKVIKGYQKFSATPKYMVYN

SEQ ID NO: 5890 - DNA, 1389 bp, Oryza sativa
  CDS (1)..(1389)
atggggcagggcaccccgggaggcatgggcaagcagggcggcgcccccggcgaccgcaagcctggcggcgacggcgacaagaaggaccgcaagttcgagccccccgccgccccctcccgcgtcggccgcaagcagcgcaagcagaagggccccgaggcggccgctcgcctccccaacgtcgcccctctctccaagtgccgcctccgcctcctcaagctcgagcgggtcaaggactacctcctcatggaggaggagttcgtcgccgcccaggagcgcctccgccccaccgaggacaagaccgaggaggaccgatccaaggtcgacgacctccgcggcacccccatgagcgtcggatccctcgaggagatcatcgacgagagccatgccatcgtctcctcctccgtcggccccgagtactacgtcggcatcctctccttcgtcgacaaggaccagctcgagcccggctgctccatcctcatgcacaacaagatggctgtcagatgccaatgcttgtataaggctgcttttcaggttctgtctgtggtcggaattttgcaagatgaagttgatcctatggtttctgtgatgaaagtggagaaagctccgctggaatcctatgctgacattggtgggctagatgcccagatccaagaaatcaaagaggcagttgagcttcctttgacccatcctgagctatatgaagacattggcatcaggccacccaagggagtcatattatacggagaacctggaacagggaagacactacttgccaaggctgttgctaactccacatccgcaactttcttgcgtgttgttggaagtgagcttattcaaaagtatcttggtgatggtcccaaactagtcagggaactgttcagagttgctgatgagctttctccctcaatagtctttatcgatgagattgatgctgttggaacaaagaggtacgatgctcattcaggaggggagcgtgagattcagagaactatgttggagcttcttaaccagttagatggttttgactctcgtggtgatgtcaaagttatactagcaacaaatcgcatcgaaagtcttgatccagcattgctacgccctggtcgcatagatcggaagatagaatttcctctgccagatattaaaactaggcggcgcatcttccagatacacacatctaagatgacattggcagatgatgttaacctagaagagtttgtgatgaccaaggatgagttttctggtgctgacatcaaagcaatatgtacggaggccggattgctcgctttaagggagcgcagaatgaaggtgacacatgccgatttcaagaaggccaaaaagaaggtcatgttcaagaagaaggaaggtgtaccggaagggctttatatgtga

SEQ ID NO: 5891 - protein, 462 aa, Oryza sativa
MGQGTPGGMGKQGGAPGDRKPGGDGDKKDRKFEPPAAPSRVGRKQRKQKGPEAAARLPNVAPLSKCRLRLLKLERVKDYLLMEEEFVAAQERLRPTEDKTEEDRSKVDDLRGTPMSVGSLEEIIDESHAIVSSSVGPEYYVGILSFVDKDQLEPGCSILMHNKMAVRCQCLYKAAFQVLSVVGILQDEVDPMVSVMKVEKAPLESYADIGGLDAQIQEIKEAVELPLTHPELYEDIGIRPPKGVILYGEPGTGKTLLAKAVANSTSATFLRVVGSELIQKYLGDGPKLVRELFRVADELSPSIVFIDEIDAVGTKRYDAHSGGEREIQRTMLELLNQLDGFDSRGDVKVILATNRIESLDPALLRPGRIDRKIEFPLPDIKTRRRIFQIHTSKMTLADDVNLEEFVMTKDEFSGADIKAICTEAGLLALRERRMKVTHADFKKAKKKVMFKKKEGVPEGLYM

SEQ ID NO: 5892 - DNA, 1290 bp, Oryza sativa
  CDS (1)..(1290)
atgacgtcatccggcgctcccccgccggcggcgatggccgtggacgacgcggaggacgaccagctcgcctccatgtccacggaggacatcgtccgtgcctcccgcctactcgacaacgagatccgcgtcctcaaggatgagctgcagaggaccaacttggagctggaatcgttcaaggagaagattaacgagaaccaggagaagattaagctcaacaaccagcttccctacctcgtcggcaacatcgttgagattctggaaatgaaccctgaggatgaagctgaggaggatggtgctaatattgatttagactcacaaaggaaaggaaaatgtgttgttctgaagacttccacaagacaaactatattccttcctgtggttgggctagttgaccctgataaactcaagcctggtgatttggttggagtaaacaaagacagctaccttatactggacacactgccatcagagtatgattcacgagtaaaggcaatggaggtggatgaaaaacccacagaggactacaatgatattggaggtcttgaaaagcagattcaagagcttgtggaggcaattgttttgccaatgacacacaaagatcggttccaaaagttgggcattcgcccccccaaaggagttcttttgtatggaccacctggaactgggaaaacattgatggctcgtgcatgtgctgcacagacaaatgcaacgttcctgaaattagctggtccacaattagtccagatgtttatcggtgatggagcaaagctggttcgggatgcttttcagcttgctaaggagaaagctccctgcatcattttcattgatgagattgatgccattgggactaagaggtttgacagtgaggttagtggtgacagagaagttcagaggactatgttggaattgctgaaccaactcgatggatttagtagtgacgagcggataaaggtcatagcggcaacgaatcgtgctgacattcttgatcctgctttgatgcgatctggtcgtttggaccgaaagattgagtttcctcatccatctgaagaagcaagagctagaatcttgcaaattcactcaagaaaaatgaatgtaaacccagatgtgaattttgaagagctggctcgctcaacagatgacttcaatggagcgcaactgaaagctgtttgtgtcgaagctggtatgcttgcactgcggcgagatgctacagaggtgactcatgaggacttcaacgaaggcataatacaggtgcaggctaagaagaagtctagcctaaattattacgcttaa

SEQ ID NO: 5893 - protein, 429 aa, Oryza sativa
MTSSGAPPPAAMAVDDAEDDQLASMSTEDIVRASRLLDNEIRVLKDELQRTNLELESFKEKINENQEKIKLNNQLPYLVGNIVEILEMNPEDEAEEDGANIDLDSQRKGKCVVLKTSTRQTIFLPVVGLVDPDKLKPGDLVGVNKDSYLILDTLPSEYDSRVKAMEVDEKPTEDYNDIGGLEKQIQELVEAIVLPMTHKDRFQKLGIRPPKGVLLYGPPGTGKTLMARACAAQTNATFLKLAGPQLVQMFIGDGAKLVRDAFQLAKEKAPCIIFIDEIDAIGTKRFDSEVSGDREVQRTMLELLNQLDGFSSDERIKVIAATNRADILDPALMRSGRLDRKIEFPHPSEEARARILQIHSRKMNVNPDVNFEELARSTDDFNGAQLKAVCVEAGMLALRRDATEVTHEDFNEGIIQVQAKKKSSLNYYA

SEQ ID NO: 5894 - DNA, 1155 bp, Oryza sativa
  CDS (1)..(1155)
atggccacggtggcgatggacatctccaagccccctcccgcggcgggcggcgacgaggctgcggcggcgaaggggaggggcggcgccggaggaggagttagaatgctcagggaagagctgcagttgcttcaagaacctggctcgtatgttggtgaggtggtgaaggtcatgggtaaatcaaaggttctagtgaaggtacatccagaaggcaaatatgtggtggatattgataaaagcattgatattacaaagatcacaccttcaacaagagttgctcttcgaaatgatagctatatgcttcatttgatcctgccaagcaaagttgatccgttggtcaatcttatgaaagttgagaaggttcctgattctacttatgatatgattggaggtcttgatcagcaaatcaaagagatcaaagaggtcattgaacttcctatcaaacatccagagctatttgagagtcttggaattgcccaaccaaagggtgtccttctctatggccctccaggcacaggaaaaacattgttggcacgtgcagttgctcatcacactgactgcaccttcatcagggtgtctggttccgagttagttcagaagtacattggtgagggttctcggatggtccgtgaactctttgttatggccagggaacatgcaccatccattattttcatggatgaaatagactccattggatctgctaggatggagtctggaactggcaacggtgacagtgaagtccagcgaaccatgcttgagcttctgaaccaacttgatggttttgaagcatcaaacaaaataaaggttctgatggcaacaaataggatagacatcttggatcaggcccttctgaggcctggtcgcatagacaggaaaattgaatttcctaatcctaatgaggattcacgctttgatatcttgaagattcattcaagaaaaatgaacttgatgcgtggtattgatctgaaaaagatcgctgaaaagatgaatggggcttcaggagccgagctcaaggcggtctgcacagaagctggaatgtttgctcttcgtgagagaagggtgcatgtaacacaagaggactttgagatggcagtggcgaaggtgatgaagaaagacacggaaaagaacatgtccctacggaagctctggaagtga

SEQ ID NO: 5895 - protein, 384 aa, Oryza sativa
MATVAMDISKPPPAAGGDEAAAAKGRGGAGGGVRMLREELQLLQEPGSYVGEVVKVMGKSKVLVKVHPEGKYVVDIDKSIDITKITPSTRVALRNDSYMLHLILPSKVDPLVNLMKVEKVPDSTYDMIGGLDQQIKEIKEVIELPIKHPELFESLGIAQPKGVLLYGPPGTGKTLLARAVAHHTDCTFIRVSGSELVQKYIGEGSRMVRELFVMAREHAPSIIFMDEIDSIGSARMESGTGNGDSEVQRTMLELLNQLDGFEASNKIKVLMATNRIDILDQALLRPGRIDRKIEFPNPNEDSRFDILKIHSRKMNLMRGIDLKKIAEKMNGASGAELKAVCTEAGMFALRERRVHVTQEDFEMAVAKVMKKDTEKNMSLRKLWK

SEQ ID NO: 5896 - DNA, 1203 bp, Zea mays
  CDS (1)..(1203)
atggccgatgcggaggacgccgccgccgcgcgccgacgggccgccataaccgactaccgcaagaagctgctcaactgcagggagctcgagtcgcgcgtcggcaccgtgagagaaagccttaaaaatgcaaagagggattttaccaagactgaagacgacttgaaatctctgcagagcgtggggcaaataattggagaggttctccgacctcttgataatgaacgctttattgtgaaggccagcagtggtccccgatatgtggtcggttgccgaagtaaagtagacaaggagaagttgacatctggaactcgtgttgtacttgacatgacgaccttgacaataatgcgcactcttccacgggaggtggatccagtggtatataacatgcttcatgaagatccaggaaatgtcagttactctgctgtaggcggtttgtctgatcagattagggagctcagggagtccattgagttaccacttatgaaccctgaactctttcttcgggtgggaattaagcctcctaagggtgttctactctacggtcctccgggaactgggaagaccctattggcaagggctatcgccagtaacatcgatgccaactttttgaagattgtttcaagcgctattattgacaaatacattggagaaagtgctcgtttgattagagaaatgtttggctatgcacgtgatcaccaaccatgcatcatcttcatggatgaaattgatgccattggtgggcgaagattcagtgagggaactagtgctgatcgtgagatccagcggacgttgatggaactccttaatcaattagacggatttgatgagctcggaaaggtaaagatgatcatggccacgaatcgacctgatgttctggaccctgcgctcctgcgtcctggacgtttagacaggaagattgaaattccgctacccaacgagcaatcaagaatggaagttctaaaaatccatgcagctggtattgccaagcatggggaaattgattatgaagcagtcgtgaaactagctgaaggtttcaatggtgctgatcttcggaacgtgtgcactgaagctggtatggctgcaattcgtgcagagagagattatgtagtccacgaagacttcatgaaggctgtgcggaagctaaatgatgcgaaaaagctggaatcaagtgcgcattacagcgcagattttggcaaagagtaa

SEQ ID NO: 5897 - protein, 400 aa, Zea mays
MADAEDAAAARRRAAITDYRKKLLNCRELESRVGTVRESLKNAKRDFTKTEDDLKSLQSVGQIIGEVLRPLDNERFIVKASSGPRYVVGCRSKVDKEKLTSGTRVVLDMTTLTIMRTLPREVDPVVYNMLHEDPGNVSYSAVGGLSDQIRELRESIELPLMNPELFLRVGIKPPKGVLLYGPPGTGKTLLARAIASNIDANFLKIVSSAIIDKYIGESARLIREMFGYARDHQPCIIFMDEIDAIGGRRFSEGTSADREIQRTLMELLNQLDGFDELGKVKMIMATNRPDVLDPALLRPGRLDRKIEIPLPNEQSRMEVLKIHAAGIAKHGEIDYEAVVKLAEGFNGADLRNVCTEAGMAAIRAERDYVVHEDFMKAVRKLNDAKKLESSAHYSADFGKE

SEQ ID NO: 5898 - DNA, 1263 bp, Zea mays
  CDS (1)..(1263)
atgtcggccgccacaaccgccccaacccctgcggtggccaccccgatggcgccgcctccgtcgtacccggcctcctccacgatctccgcctccgtggccgcgtcggtcgaggaagaggacgacctctatggccgcctcaagtcgctccagcgccacatggagttcgtcgagatccaggaggagtacgttaaagacgaacagaagaacctcaagcgcgaactcctccgtgcgcaggaggaggtcaagcggatccagtccgtaccgctcgtcatcggccagtttatggagatggtcgacggcaacaacggcatcgtgggttctactacgggcagcaactactatgtgcggatcctcagcaccatcaaccgcgagctgctcaagccgtcagcatctgtcgcgttgcatcgtcactccaacgctttagtcgacgtgctgccgcccgaggccgactccagcatctccttgctgggatcgtcggagaagcccaacgtcacctacaacgatattggaggatgcgacatccaaaagcaagaaatacgggaggcggttgagttacccttgactcatcatgagttgtacaagcagattggtattgatcctccaagaggggtgcttctgtatggtcctccgggtactggcaagaccatgcttgccaaagcagtcgcacatcataccactgctgcttttatcagggtcgtcggttcagagtttgttcaaaagtacttgggtgagggccctagaatggtgcgtgacgtgttccgtttggccaaggagaatgccccagcaatcattttcattgatgaggttgatgctatagccactgctcgttttgatgctcagactggtgctgaccgagaagttcagcgtattcttatggagctactcaatcagatggatgggtttgatcaaacagtcaatgtgaaggttataatggcaactaatcgggcagacactctagatcctgctttgttgcgtcctggtagacttgacaggaaaattgagttccctctgccagaccggcgtcagaagaggcttgtttttcaagtttgcactgccaaaatgaacctgagcgatgaggttgatttggaagattatgtttccagaccggataagatcagtgctgctgatattgctgctatctgccaagaggctggcatgcatgctgtccgcaaaaaccgatatgtcatcctccccaaggactttgaaaagggctaccgaaccaacgtgaagaagcccgagacagactttgatttctacaaatga

SEQ ID NO: 5899 - protein, 420 aa, Zea mays
MSAATTAPTPAVATPMAPPPSYPASSTISASVAASVEEEDDLYGRLKSLQRHMEFVEIQEEYVKDEQKNLKRELLRAQEEVKRIQSVPLVIGQFMEMVDGNNGIVGSTTGSNYYVRILSTINRELLKPSASVALHRHSNALVDVLPPEADSSISLLGSSEKPNVTYNDIGGCDIQKQEIREAVELPLTHHELYKQIGIDPPRGVLLYGPPGTGKTMLAKAVAHHTTAAFIRVVGSEFVQKYLGEGPRMVRDVFRLAKENAPAIIFIDEVDAIATARFDAQTGADREVQRILMELLNQMDGFDQTVNVKVIMATNRADTLDPALLRPGRLDRKIEFPLPDRRQKRLVFQVCTAKMNLSDEVDLEDYVSRPDKISAADIAAICQEAGMHAVRKNRYVILPKDFEKGYRTNVKKPETDFDFYK

SEQ ID NO: 5900 - DNA, 1257 bp, Triticum aestivum
  CDS (1)..(1257)
atggcgacggtggcgatggacatctcgaagcccccgccggccgcgtccggcgacgagtcggccaagggcgcgcgtggcggaggcgaggggttgcgccagtactacctgcagcacatccacgacctgcagctccagatccgccagaagacgcacaacctcaaccgcctcgaggcccagcgcaacgacctcaactcccgagttagaatgcttagggaagagctacagttactccaagagcctggctcttatgttggtgaggtggtgaaggtcatgggcaaatcaaaggttctagttaaggtgcatccagaaggcaaatatgtagtagatattgataagagcatcgatatcacaaaaatcacaccttcaacaagagttgctcttcggaatgatagctatatgcttcatttggtccttccaagcaaagttgatccactggtcaatcttatgaaagttgagaaggtcccagattctacatatgatatgattggaggtcttgatcagcaaatcaaggagatcaaagaggtcatcgagcttcctatcaaacatcctgagttatttgagagccttggaattgcgcagccaaagggtgtcctcctttatggaccaccagggacaggcaaaacattactggcacgtgcagttgctcatcacaccgactgtaccttcatcagggtatctggttctgagttggttcagaagtatattggtgagggctcccggatggttcgtgaactctttgttatggctagggagcatgcaccatctattatattcatggatgaaatagactccattggatctgctagaatggagtctggaactggcaatggtgatagtgaagtgcaacggaccatgcttgagcttctaaaccaacttgatggttttgaagcatcaaacaaaattaaggttctgatggcaacaaaccgcatagacatcttggatcaagcccttttgaggcctggccgcatagacaggaagattgaatttccaaatcctaatgaggattcacgaggtgatatcttgaagattcattcaagaaggatgaacttgatgcgtggaattgatctgaaaaagattgcgggaaagatgaatggcgcttccggagctgagctaaaggcggtctgcaccgaagccggaatgtttgctctccgtgagagaagggtgcacgtaacgcaggaggacttcgagatggcggtggccaaggtgatgaagaaggacaatgagaagaacatgtccttgcggaagctgtggaagtga

SEQ ID NO: 5901 - protein, 418 aa, Triticum aestivum
MATVAMDISKPPPAASGDESAKGARGGGEGLRQYYLQHIHDLQLQIRQKTHNLNRLEAQRNDLNSRVRMLREELQLLQEPGSYVGEVVKVMGKSKVLVKVHPEGKYVVDIDKSIDITKITPSTRVALRNDSYMLHLVLPSKVDPLVNLMKVEKVPDSTYDMIGGLDQQIKEIKEVIELPIKHPELFESLGIAQPKGVLLYGPPGTGKTLLARAVAHHTDCTFIRVSGSELVQKYIGEGSRMVRELFVMAREHAPSIIFMDEIDSIGSARMESGTGNGDSEVQRTMLELLNQLDGFEASNKIKVLMATNRIDILDQALLRPGRIDRKIEFPNPNEDSRGDILKIHSRRMNLMRGIDLKKIAGKMNGASGAELKAVCTEAGMFALRERRVHVTQEDFEMAVAKVMKKDNEKNMSLRKLWK

SEQ ID NO: 5902 - DNA, 1257 bp, Triticum aestivum
  CDS (1)..(1257)
atggcgaccgcagcaaaccctcccgcggccctcccgtcggcgcccccgccctcctaccccgccaccgccgcccactgcgcctcctcctcctccgccgcggccgaggacgacgacgacctctacggccgcctcaaatcgctccagcgccacatggagttcgtcgagatccaggaggagtacgtcaaggacgagcagaagaacctgaagcgcgagctgctgcgcgcgcaggaggaggtcaagcggatccagtccgtgcccctcgtcatcggccagttcatggagatggtcgacggcaacaacggcatcgtcggatccaccaccggcagcaactactacgtgcggatcctcagcaccatcaaccgcgagctgctcaagccgtcggcgtccgtcgccctgcaccgccactccaacgcgctcgtcgacgtgctgccgcccgaggccgactccagcatctcgctgctcgcttcgtcggagaagcccaacgtcctatattcggacattggaggatgtgatattcaaaaacaagaaattcgggaggcagttgagctaccattgacacaccatgagttgtacaagcagattggtattgatcctccaagaggggtgctgctctatggtcctccaggcactggcaagaccatgcttgctaaagctgtggcacatcacactactgctgcttttatcagagtggttggttcagagtttgtgcagaagtacttgggtgagggcccaaggatggttcgagatgtattccgcttagctaaagagaatgccccggctataatattcattgatgaggttgatgctatagccactgctcgattcgatgctcagaccggggctgaccgagaagttcagcgtattctgatggagctactgaatcagatggatggatttgatcaaacagtgaatgtgaaggttataatggcaaccaatcgggcagatactctagatcctgctctgttgcgtccaggaagactggacaggaaaatcgagttccccctgccggaccggaggcagaagaggcttgttttccaagtttgtactgctaagatgaacttgagtgacgaggttgatttggaagattatgtctccagacctgataaaatcagtgctgctgatatcactgctatttgccaggaagctggcatgcatgctgtccgcaaaaatcgctatgttatcctccccaaggacttcgagaagggttaccgaaccaacgtcaagaagcctgagacagactttgacttctacaaatga

SEQ ID NO: 5903 - protein, 418 aa, Triticum aestivum
MATAANPPAALPSAPPPSYPATAAHCASSSSAAAEDDDDLYGRLKSLQRHMEFVEIQEEYVKDEQKNLKRELLRAQEEVKRIQSVPLVIGQFMEMVDGNNGIVGSTTGSNYYVRILSTINRELLKPSASVALHRHSNALVDVLPPEADSSISLLASSEKPNVLYSDIGGCDIQKQEIREAVELPLTHHELYKQIGIDPPRGVLLYGPPGTGKTMLAKAVAHHTTAAFIRVVGSEFVQKYLGEGPRMVRDVFRLAKENAPAIIFIDEVDAIATARFDAQTGADREVQRILMELLNQMDGFDQTVNVKVIMATNRADTLDPALLRPGRLDRKIEFPLPDRRQKRLVFQVCTAKMNLSDEVDLEDYVSRPDKISAADITAICQEAGMHAVRKNRYVILPKDFEKGYRTNVKKPETDFDFYK

SEQ ID NO: 5904 - DNA, 1305 bp, Triticum aestivum
  CDS (1)..(1305)
atgtcgtcctcccctacccccgcgccagacgccggcgccgccgcgatggccgtcgacgactcgtcggagaccgaccagctcgactccatgtccacggaggacatcgtccgggccacccgcctcctcgacaacgaggtccgcgtcctcaaggacgagctgcagcggaacaacctggagctcgagaacgtcaaggacaagatcaaggagaaccaggagaagataaagctcaacaagcagctgccctacctcgtcggcaacatcgtcgagattttggaaatgaaccctgaagatgaggctgaagaggatggtgctaatatagatctggactcacagaggaaaggaaaatgtgttgttcttaagacatccacaagacagactatattccttcctgtgatcgggctagttgaccctgacaacctcaagcctggtgatttggttggagtcaacaaggacagctacttgatattagacacgctaccttcggagtatgactctcgagtaaaggcaatggaggtagatgaaaagcctacggaggattataatgacattggtggccttgagaaagagattcaggaactcgttgaagctatagtgttgccaatgacacacaaggagcaatttcagaagttgggaatccgtcccccgaaaggagttcttttatatggaccacctgggacgggaaagacattgatggctcgtgcatgtgctgcacaaaccaatgcaacctttctgaaacttgctggtccgcagctagtccagatgttcatcggtgacggggcaaagcttgtccgagatgcctttgagctggcaaaggagaaggccccctgcatcatttttattgatgagattgatgcaattggaacaaagcgttttgacagtgaagtgagtggtgacagagaagtgcaacgaactatgttggagttgctgaatcagctagatggatttagcagtgatgagaggataaaggtgatagctgcaaccaatcgtgcagatattctcgatcctgctttactccgttctggtcgcctggacagaaagattgagttccctcatccgacggaagaagcaagagctcggattttgcaaattcactcaagaaagatgaacgtacatcctgatgtcaactttgaggagctggctcgttcaactgatgatttcaacggtgcacagctgaaggctgtttgtgtggaagctggcatgcttgctctacgcagggacgctacagaggtgatccatgaagatttcaacgaaggcattatccaagtgcaagcaaagaagaagtccagcttgaattattacgcttag

SEQ ID NO: 5905 - protein, 434 aa, Triticum aestivum
MSSSPTPAPDAGAAAMAVDDSSETDQLDSMSTEDIVRATRLLDNEVRVLKDELQRNNLELENVKDKIKENQEKIKLNKQLPYLVGNIVEILEMNPEDEAEEDGANIDLDSQRKGKCVVLKTSTRQTIFLPVIGLVDPDNLKPGDLVGVNKDSYLILDTLPSEYDSRVKAMEVDEKPTEDYNDIGGLEKEIQELVEAIVLPMTHKEQFQKLGIRPPKGVLLYGPPGTGKTLMARACAAQTNATFLKLAGPQLVQMFIGDGAKLVRDAFELAKEKAPCIIFIDEIDAIGTKRFDSEVSGDREVQRTMLELLNQLDGFSSDERIKVIAATNRADILDPALLRSGRLDRKIEFPHPTEEARARILQIHSRKMNVHPDVNFEELARSTDDFNGAQLKAVCVEAGMLALRRDATEVIHEDFNEGIIQVQAKKKSSLNYYA

SEQ ID NO: 5906 - DNA, 1281 bp, Triticum aestivum
  CDS (1)..(1281)
atggcgccggagccggaggacgacatcatggcggagaagaacccgcgccccctcgacgaggacgacatcgccctccttaagacctacgggcttgggccatactccacgagcatcaagacggccgagaaggagatcaaggagttggccaagaggatcaatgacctatgtgggataaaggagtctgatactgggctggctccacctagccagtgggatctggtgtcagacaaacagatgatgcaagaagagcagccattacaagtagcaaggtgcaccaagattataaaccctaataccgacgatgccaagtacatgattaatgtaaaacaaattgcaaagtttgtggttggattgggggataaagtttcgccaactgatatcgaggaagggatgagagtcggtgtcgatcggaacaagtatcagatacagattccattgccaccaaagattgatcccagcgtcaccatgatgactgttgaggaaaaaccagatgtcacgtataatgatgttggcgggtgcaaggagcagattgaaaaaatgcgtgaggtagtcgagctccccatgcttcacccggaaaagtttgtgaagcttggtatcgaccctccgaaaggtgtcctttgctacggtcctcctggcactggcaagactcttcttgctagagctgttgctaatcgcacggatgcttgtttcatccgtgtaattggtagtgaattagttcagaagtatgttggtgagggcgctcggatggttagggagttatttcagatggctcggtcgaagaaagcatgcatcatattcttcgatgaagttgatgcaattggtggtgctcgttttgatgatggagctgggggcgataacgaagtacagcgtactatgcttgaaatcgtcaatcagcttgatggttttgatgctagggggaatatcaaggttctcatggccaccaacaggcctgatacacttgatcctgcacttctgcgtcctggtcgtttggacagaaaggtggaatttgggttacctgacttggaaggccgtacccagatattcaaaatacatacgcgcaccatgaactgtgagcgtgatatacgcttcgagctactggcgcgactctgccccaacgccactggcgccgacatcaggagtgtctgcacagaagctggcatgtacgccatccgcgcccgcaggaagactgtgactgaaaaggatttcctcgactcggtcaacaaggtcatcaaggggtaccagaaattcagcgcaaccccaaaatacatggtgtacaattga

SEQ ID NO: 5907 - protein, 426 aa, Triticum aestivum
MAPEPEDDIMAEKNPRPLDEDDIALLKTYGLGPYSTSIKTAEKEIKELAKRINDLCGIKESDTGLAPPSQWDLVSDKQMMQEEQPLQVARCTKIINPNTDDAKYMINVKQIAKFVVGLGDKVSPTDIEEGMRVGVDRNKYQIQIPLPPKIDPSVTMMTVEEKPDVTYNDVGGCKEQIEKMREVVELPMLHPEKFVKLGIDPPKGVLCYGPPGTGKTLLARAVANRTDACFIRVIGSELVQKYVGEGARMVRELFQMARSKKACIIFFDEVDAIGGARFDDGAGGDNEVQRTMLEIVNQLDGFDARGNIKVLMATNRPDTLDPALLRPGRLDRKVEFGLPDLEGRTQIFKIHTRTMNCERDIRFELLARLCPNATGADIRSVCTEAGMYAIRARRKTVTEKDFLDSVNKVIKGYQKFSATPKYMVYN

SEQ ID NO: 5908 - DNA, 1353 bp, Triticum aestivum
  CDS (1)..(1353)
atggggcagggttctccaggcggcatgggcaagcagggcggtctccccggtgaccgcaagccgggcgacggtgccgccggcgacaagaaggacaagaagttcgagccccccgccgcaccgtcgcgcgtggggcgcaagcagcggaaacagaggggccccgaggcggcggcgcggctgccccccgtggcgccgctctccaagtgccgcctccgccttctcaagctggaccgcgtcaaggactaccttctcatggaggaggagttcgtcgcgagccaggagcggctgcgccccagcgaagacaagacggaggaggaccgatctaaggtcgacgacctccgcggcacccctatgagcgttggctcgctcgaggagatcatcgacgagagccacgccatcgtctcgtcctccgttgggcctgagtactatgtcagcgtactctcgttcgtcgacaaggaccagctggagccgggatgctccatactgatgcataacaaggttctctcggtggttggaattttgcaagatgaagttgatcctatggtttctgtcatgaaagttgagaaggcacctttggagtcttatgctgacattggtggtttggatgcccaaattcaagagatcaaagaggcagtggaacttccgttgacacatcctgagctatatgaggacattgggatcaggcctccgaagggagtcatactatacggggaacctggaacagggaaaactctacttgcaaaggctgttgccaattctacatcagcaacattcttgcgtgttgttgggagtgagttgatccagaagtaccttggtgacggccccaagcttgtaagagaactgtttagggtggctgatgatctgtctccttcaattgtcttcattgatgagattgatgcagttggaacaaagaggtatgatgctcattcaggtggtgagcgtgagattcagagaaccatgttggagttgttaaatcagctcgatggttttgattcaagaggagatgtaaaggttattctagcgacaaaccgcattgagagccttgacccagccttgcttcgaccaggccgaatagacagaaagattgaatttccattaccagatattaaaacacgacggcgtatctttcagatacacactgctaagatgacattggcagaagatgtgaacctagaagagtttgtgatgaccaaagatgagttttctggtgctgatatcaaagccatttgtactgaagctggattgcttgccttaagagagcgcaggatgaaggtgacacatgctgacttcaagaaggccaaagagaaggtaatgttcaagaagaaggaaggtgtaccggaggggctgtacatgtga

SEQ ID NO: 5909 - protein, 450 aa, Triticum aestivum
MGQGSPGGMGKQGGLPGDRKPGDGAAGDKKDKKFEPPAAPSRVGRKQRKQRGPEAAARLPPVAPLSKCRLRLLKLDRVKDYLLMEEEFVASQERLRPSEDKTEEDRSKVDDLRGTPMSVGSLEEIIDESHAIVSSSVGPEYYVSVLSFVDKDQLEPGCSILMHNKVLSVVGILQDEVDPMVSVMKVEKAPLESYADIGGLDAQIQEIKEAVELPLTHPELYEDIGIRPPKGVILYGEPGTGKTLLAKAVANSTSATFLRVVGSELIQKYLGDGPKLVRELFRVADDLSPSIVFIDEIDAVGTKRYDAHSGGEREIQRTMLELLNQLDGFDSRGDVKVILATNRIESLDPALLRPGRIDRKIEFPLPDIKTRRRIFQIHTAKMTLAEDVNLEEFVMTKDEFSGADIKAICTEAGLLALRERRMKVTHADFKKAKEKVMFKKKEGVPEGLYM

SEQ ID NO: 5910 - DNA, 1203 bp, Triticum aestivum
  CDS (1)..(1203)
atggccgaggccgacgacgccgccgccgcccgccggcgcaccgtcatcacggagtaccgcaacaagctcctcaactgccgcgagctggagacgagggtccgcacaggtagggaaaacctaaaaaaggcaaagaaagattacgataaaactgaagatgatttgaagtccttgcagagtgtgggccaaatcattggtgaagtacttcgaccattggacagtgaaagatttatcgtcaaagccagtagtggcccacgttatgtggttggctgcagaagcaaagttgacaaagaaaagctgacagctgcaacacgagttgtccttgacatgacaacattaacaataatgcgcactctaccacgtgaggttgatcccgtggtctataacatgctacacgaagaccccggcaatgtcagttactcagctgtaggtggactgtcggatcaaataagggagctgcgggagtccatcgagttacctcttatgaatccagaattgtttcttcgcgttgggattaaaccaccaaagggtgttctgctctatggcccacctggaacgggaaagacattgcttgctagagccattgctagcaacatcgatgctaactttttaaagattgtttcaagtgctatcattgacaaatatattggtgaaagtgcccgtcttataagagaaatgtttaactatgcacgtgagcatcaaccatgtattattttcatggatgagattgatgccattggtggccgaagattcagtgagggcactagtgcagatcgtgaaatacaacggacattgatggagctcctaaatcagttggatggattcgatgagctcggaaaggtgaagatgatcatggcgacgaaccggcctgatgtcttggaccctgcgctccttcgtcctggacgcctagaccggaagatagagattccgctgccgaatgagcaatccaggacggaggtcctgaaaatccatgcagctggtatcgccaagcatggcgaaattgattacgaggctgtggttaagctggccgagggcttcaatggcgctgatcttcgcaatgtctgcactgaggctggcatggccgccattcgagcagagcgtgactacgtcatccacgaagacttcatgaaggcagttcggaagttgaatgacgccaagaagctcgagtccagcgcacactacagcgccgactttggcaaggactaa

SEQ ID NO: 5911 - protein, 400 aa, Triticum aestivum
MAEADDAAAARRRTVITEYRNKLLNCRELETRVRTGRENLKKAKKDYDKTEDDLKSLQSVGQIIGEVLRPLDSERFIVKASSGPRYVVGCRSKVDKEKLTAATRVVLDMTTLTIMRTLPREVDPVVYNMLHEDPGNVSYSAVGGLSDQIRELRESIELPLMNPELFLRVGIKPPKGVLLYGPPGTGKTLLARAIASNIDANFLKIVSSAIIDKYIGESARLIREMFNYAREHQPCIIFMDEIDAIGGRRFSEGTSADREIQRTLMELLNQLDGFDELGKVKMIMATNRPDVLDPALLRPGRLDRKIEIPLPNEQSRTEVLKIHAAGIAKHGEIDYEAVVKLAEGFNGADLRNVCTEAGMAAIRAERDYVIHEDFMKAVRKLNDAKKLESSAHYSADFGKD

SEQ ID NO: 5912 - DNA, 1347 bp, Zea mays
  CDS (1)..(1347)
atgaaaaattccgctttacatttcttgcgagagaagaagcaaagcctgtgttctgcttctgcattctggaaaaacagggtccacctccgtaaaaaaaaaaaaaagaaagcctcgcgccgccgccgccgccgaggaaggttgaggaagaggatggccgagggcggggaagaagcccgccgccgtgctgcgatcgccgagtaccgcaagaagctcctcacctgccgggagctcgaggcgcgggtcaaaactgggagggagaatctaaaaaatgcaaagaaaaacttggaaaaaactgaagaggatctaaaatcactgcaaagtgttggtcaaattatcggtgaagtgcttcgacctttggacaaggaacgatttattgtcaaggctagcagcggaccacgttatgttgttgcctgccgaagtaaagttgacaaagaaaagttgattgctggtacacgagttgttcttgacatgacaacacttaccattatgcgcattctgccacgtgaggtcgaccctgtggtttacaacatgctacatgaagatcctggcaatgtaagttactcagctgtaggtgggttgtcagatcaaataagggaactcagagaatccattgaattacctcttatgaacccagaattgtttctccgtgtcgggattaaaccgccgaagggcgtgctgctctacggtccacctggaactgggaagacgctcctagctagagccattgctagcaacattgatgctaattttttgaaggtggtgtcaagtgctatcattgataaatacattggtgaaagtgcacgcttaattcgtgaaatgtttaactatgcacgtgagcatcagccatgcatcattttcatggatgaaattgatgccattggtggccgaagatttagtgagggcacaagtgcagatcgtgagattcagaggacattgatggagcttctaaatcagttagatggattcgatgagcttgggaaggtgaaaatgatcatggcaaccaaccggcctgatgttttggatcctgcactccttcgacctggtcggttggacaggaagatcgagatcccactgccgaatgaacaagggaggatggaggtcctcaagattcatgcagctggcatcgcaaagcatggggagattgactatgaagctgtagtcaaactagctgagggcttcaatggagccgatatgcgcaacttgtgcacagaagccggcatggctgctatccgagcggagcgtgactatgtcattcacgaggacttcatgaaggctgtgcgcaagctgaatgatgccaagaagctcgagtccagtgcgcactacagtgctgacttcggcaaggattga

SEQ ID NO: 5913 - protein, 448 aa, Zea mays
MKNSALHFLREKKQSLCSASAFWKNRVHLRKKKKKKASRRRRRRGRLRKRMAEGGEEARRRAAIAEYRKKLLTCRELEARVKTGRENLKNAKKNLEKTEEDLKSLQSVGQIIGEVLRPLDKERFIVKASSGPRYVVACRSKVDKEKLIAGTRVVLDMTTLTIMRILPREVDPVVYNMLHEDPGNVSYSAVGGLSDQIRELRESIELPLMNPELFLRVGIKPPKGVLLYGPPGTGKTLLARAIASNIDANFLKVVSSAIIDKYIGESARLIREMFNYAREHQPCIIFMDEIDAIGGRRFSEGTSADREIQRTLMELLNQLDGFDELGKVKMIMATNRPDVLDPALLRPGRLDRKIEIPLPNEQGRMEVLKIHAAGIAKHGEIDYEAVVKLAEGFNGADMRNLCTEAGMAAIRAERDYVIHEDFMKAVRKLNDAKKLESSAHYSADFGKD

SEQ ID NO: 5914 - DNA, 1287 bp, Zea mays
  CDS (1)..(1287)
atgtcgtcgtcggcgcccgcaccggccgccatggccgtggacgacgcggaggacgaccagctcgcctccatgtccacggaggagatcatcagggcctcccgtctcctcgacaacgagatccgcgtccacaaggacgagctgcagcggtcgaacctggagctggagtctatcaaggagaagaccaaggagaaccaggagaagattaagctcaacaagcagctgccgtacctcgtcggcaacatcgtcgagattttggaaatgaaccctgaggatgaggctgaagaagatggtgctaacatcgatctggactcacaaaggaaaggaaaatgtgttgttctgaagacatccaccagacaaaccatattccttcctgtaattgggttagttgaccccgataagctgaagcctggcgatttagttggagttaacaaagacagctacttgatattagatacattgccttcagagtatgactcacgggttaaggcaatggaagtagatgagaaacctactgaggattacaatgacatcggcggacttgagaaacagattcaagagcttgtggaagcaatagtgttaccaatgacacacaaggaccgatttcaaaaattgggcattcgtccccccaaaggggttcttttgtatggaccccctgggaccgggaaaacgctcatggctcgtgcatgcgctgcacagactaatgcaacatttctgaaattggctggtccacaacttgtccagatgttcattggtgatggagctaagcttgttagagatgcttttcagcttgctaaggagaaagccccgtgcatcatctttattgatgaaattgatgccattggaacaaagcgttttgacagtgaagttagtggcgatagagaagtgcaaaggacaatgttggaattgctgaaccagcttgatggatttagcagcgatgagaggataaaggtgatagctgcaacaaatcgtgctgatattcttgatcctgctctgatgagatctggtcgtctggaccggaagattgagttccctcatccatcagaggaagcaagagctagaatcctgcagatccactcgaggaaaatgaatgtgaatccagatgtcaactttgaagagttggcgcgttcaaccgatgatttcaatggcgctcagctaaaggctgtttgcgtagaggctggcatgctcgctctacgccgagatgctacagaggttacccacgaggatttcaacgaggggatcatccaagtgcaggcaaagaagaagtccagcttgaattactacgcgtaa

SEQ ID NO: 5915 - protein, 428 aa, Zea mays
MSSSAPAPAAMAVDDAEDDQLASMSTEEIIRASRLLDNEIRVHKDELQRSNLELESIKEKTKENQEKIKLNKQLPYLVGNIVEILEMNPEDEAEEDGANIDLDSQRKGKCVVLKTSTRQTIFLPVIGLVDPDKLKPGDLVGVNKDSYLILDTLPSEYDSRVKAMEVDEKPTEDYNDIGGLEKQIQELVEAIVLPMTHKDRFQKLGIRPPKGVLLYGPPGTGKTLMARACAAQTNATFLKLAGPQLVQMFIGDGAKLVRDAFQLAKEKAPCIIFIDEIDAIGTKRFDSEVSGDREVQRTMLELLNQLDGFSSDERIKVIAATNRADILDPALMRSGRLDRKIEFPHPSEEARARILQIHSRKMNVNPDVNFEELARSTDDFNGAQLKAVCVEAGMLALRRDATEVTHEDFNEGIIQVQAKKKSSLNYYA

SEQ ID NO: 5916 - DNA, 1269 bp, Zea mays
  CDS (1)..(1269)
atggcgacggtggcgatggacatctcgaagcccacgccggtggcgtccggcgacgaggccgcggcggcggccaaggggaggagcggcggagggggcgaggggctgcggcagtactacctgcagcacatccacgacctgcagctccagatccggcagaagacccacaacctcaaccgtctcgaggcccagcgcaatgacctcaactcccgagttagaatgctcagggaagagttgcagttgcttcaagagcctggctcatatgttggtgaggtggtgaaggtcatggggaaatcgaaggttctggtgaaggtacaccccgaaggcaaatatgttgttgatatagataagagcattgatatcacaaagatcacaccttcaacaagagtcgctcttcgtaatgacagctatatgctccatctgatcctaccaagcaaagttgatccattggtcaatctcatgaaagttgagaaggttcctgattctacttatgatatgattggaggtcttgaccagcaaattaaagagatcaaagaggtcattgagcttccaatcaaacatccggaactatttgagagccttggaattgcacaaccaaagggtgtcctcctttatggacctccaggcacaggaaagacattgctggcacgtgcggttgctcatcacactgactgcaccttcatcagggtgtctggttctgagttggttcagaagtatattggtgaaggctcccggatggttcgggaactctttgttatggccagggaacatgcaccatccattatatttatggatgaaattgactctatcggatctgctagaatggagtctggaactggcaacggtgatagtgaagtgcagcgtaccatgcttgaacttctaaaccagcttgatggttttgaagcttcaaacaaaattaaggttttgatggcaacaaacagaatagacattttggatcaagcccttttgaggcctggccgcatagacaggaagattgagtttccaaatcctaacgaggactcacgtttcgatattctgaagatccattcaaggaaaatgaacttgatgcgtggtatcgatctgaaaaagatcgcagaaaagatgaatggggcctcaggagctgagctcaaggccgtctgtacagaggctggaatgtttgctctccgtgagagaagggtgcacgttacacaggaggacttcgagatggcagtggccaaggtgatgaagaaagacacggagaagaacatgtccctgcgcaagctctggaagtga

SEQ ID NO: 5917 - protein, 422 aa, Zea mays
MATVAMDISKPTPVASGDEAAAAAKGRSGGGGEGLRQYYLQHIHDLQLQIRQKTHNLNRLEAQRNDLNSRVRMLREELQLLQEPGSYVGEVVKVMGKSKVLVKVHPEGKYVVDIDKSIDITKITPSTRVALRNDSYMLHLILPSKVDPLVNLMKVEKVPDSTYDMIGGLDQQIKEIKEVIELPIKHPELFESLGIAQPKGVLLYGPPGTGKTLLARAVAHHTDCTFIRVSGSELVQKYIGEGSRMVRELFVMAREHAPSIIFMDEIDSIGSARMESGTGNGDSEVQRTMLELLNQLDGFEASNKIKVLMATNRIDILDQALLRPGRIDRKIEFPNPNEDSRFDILKIHSRKMNLMRGIDLKKIAEKMNGASGAELKAVCTEAGMFALRERRVHVTQEDFEMAVAKVMKKDTEKNMSLRKLWK

SEQ ID NO: 5918 - DNA, 1269 bp, Zea mays
  CDS (1)..(1269)
atggcgacggtggcgatggacatctcgaagccgacgccggcagcgtccggtgacgaggcagcggcggcggcgaaggggaggagcggcggcgggggcgaggggctgcggcagtactacctgcagcacatccatgacctgcagctccagatccggcagaagacccataacctcaaccgcctcgaggcccagcgcaacgacctcaactcccgagttagaatgctcagggaagagttgcagttgcttcaagagcctggctcatatgttggtgaggtggtgaaggtcatggggaaatcaaaggttctggtgaaggtacatcctgaaggcaaatatgtggtggatatagataagagcattgatatcactaagatcacaccttcaacaagagttgctcttcggaatgacagctatatgctccatctgatcctaccaagcaaagttgatccattggtcaatctcatgaaagttgagaaggttcctgattctacctatgatatgattggaggccttgaccagcaaattaaagagatcaaagaggtcattgagcttccaatcaaacatccggaactgtttgagagccttggaattgcgcaaccaaagggtgtccttctttatggacctccgggcacaggaaagacattgttggcacgtgcggttgctcatcacactgactgcaccttcatcagggtgtctggttctgagttggttcagaagtatattggtgagggctcccggatggttagggaactctttgttatggccagggaacatgcaccatccattatatttatggatgaaattgactctatcggatctgctagaatggagtctggaactggcaacggtgacagtgaagttcagcgtactatgcttgaacttctaaaccagctcgatggttttgaagcatcaaacaaaattaaggttttgatggcaacgaacagaatagacattttggatcaagcccttctgaggcctggccgcatagacaggaagattgaatttccaaatcctaacgaggattcacgtttcgatatcttgaagatccattcaagaaaaatgaacttgatgcgtggcattgatctgaaaaagatcgcggaaaagatgaatggggcctcaggagctgagctcaaggccgtctgcacagaggctggaatgtttgctcttcgtgagagaagggtgcacgttacccaggaggacttcgagatggcagtggccaaggtgatgaagaaagacacggagaagaacatgtccctgcgcaagctctggaagtga

SEQ ID NO: 5919 - protein, 422 aa, Zea mays
MATVAMDISKPTPAASGDEAAAAAKGRSGGGGEGLRQYYLQHIHDLQLQIRQKTHNLNRLEAQRNDLNSRVRMLREELQLLQEPGSYVGEVVKVMGKSKVLVKVHPEGKYVVDIDKSIDITKITPSTRVALRNDSYMLHLILPSKVDPLVNLMKVEKVPDSTYDMIGGLDQQIKEIKEVIELPIKHPELFESLGIAQPKGVLLYGPPGTGKTLLARAVAHHTDCTFIRVSGSELVQKYIGEGSRMVRELFVMAREHAPSIIFMDEIDSIGSARMESGTGNGDSEVQRTMLELLNQLDGFEASNKIKVLMATNRIDILDQALLRPGRIDRKIEFPNPNEDSRFDILKIHSRKMNLMRGIDLKKIAEKMNGASGAELKAVCTEAGMFALRERRVHVTQEDFEMAVAKVMKKDTEKNMSLRKLWK

SEQ ID NO: 5920 - DNA, 1341 bp, Zea mays
  CDS (1)..(1341)
atgggacaaggttctcccggcgggatgggcaagcagcccggccttccgggcgaccgcaagcagggagacggcaagaaagagaagaaatatgaaccacccgctgccccttcccgtgtcggccggaagcagaagcggcagaagggctccgaggcggcggcgcggctccccgccgtggcgccgctctcaaagtgccgccttcgcctactcaagctcgaacgcgtcaaggactaccttctcatggaagaggagttcgttgccagccaggagcgcctgcgccccagcgaggataagacggaggaggaccgatccaaggtcgacgacctccgcggcactcccatgaacgtcggatcgctggaggagatcatcgacgagacccatgccatcgtctcctcgtccgtcggtcccgagtactacgtcgggatactttccttcgttgataaggaccagctcgagcctggatgtgccattctgatgcacaacaaggttctgtcagtggttggtattttgcaagacgaagttgatcctatggtttctgtgatgaaagttgaaaaggcacctttggagtcttatgctgacattggtggcttggatgctcaaattcaagaaatcaaagaagcagttgaacttcccttaacacatcctgagctatatgaggacattgggatcagacctccgaagggagttatactatatggggaacctggaacagggaaaactctactcgcaaaggctgttgccaattctacttcagcaacgttcttgcgtgttgttgggagtgaattgatccaaaagtaccttggtgatggtcccaagcttgttagagaattgttcagggtggctgatgatctttctccttcaattgtctttattgatgagattgatgctgttgggacaaagaggtacgatgctcattctggtggcgagcgtgagattcagagaaccatgttggagttgttaaatcagctggatggttttgattcaagaggagatgttaaagttattctagcaacaaatcgtattgagagtcttgatccagccttgcttcgcccaggtcgaattgacagaaagattgaattccctttacctgatgtcaagactaggcggcgcatcttccagatacacacatcgaaaatgacactggctgatgatgtaaacctagaagagtttattatgtcaaaagatgagttttcaggtgctgacatcaaggccatttgtactgaagctggcttgcttgctttgagagagcggcggatgaaggtgacgcatgcagacttcaagaaggccaaagaaaaggttatgttcaagaagaaagaaggcgtgccggagggcctatatatgtga

SEQ ID NO: 5921 - protein, 446 aa, Zea mays
MGQGSPGGMGKQPGLPGDRKQGDGKKEKKYEPPAAPSRVGRKQKRQKGSEAAARLPAVAPLSKCRLRLLKLERVKDYLLMEEEFVASQERLRPSEDKTEEDRSKVDDLRGTPMNVGSLEEIIDETHAIVSSSVGPEYYVGILSFVDKDQLEPGCAILMHNKVLSVVGILQDEVDPMVSVMKVEKAPLESYADIGGLDAQIQEIKEAVELPLTHPELYEDIGIRPPKGVILYGEPGTGKTLLAKAVANSTSATFLRVVGSELIQKYLGDGPKLVRELFRVADDLSPSIVFIDEIDAVGTKRYDAHSGGEREIQRTMLELLNQLDGFDSRGDVKVILATNRIESLDPALLRPGRIDRKIEFPLPDVKTRRRIFQIHTSKMTLADDVNLEEFIMSKDEFSGADIKAICTEAGLLALRERRMKVTHADFKKAKEKVMFKKKEGVPEGLYM

SEQ ID NO: 5922 - DNA, 1197 bp, Zea mays
  CDS (1)..(1197)
atggccgagggcggggaagaagcccgccgccgtgctgcgatcgccgagtaccgcaagaagctcctcacctgccgggagctcgaggcgcgggtcaaaactgggagggagaatctaaaaaatgcaaagaaaaacttggaaaaaactgaagaggatctaaaatcactgcaaagtgttggtcaaattatcggtgaagtgcttcgacctttggacaaggaacgatttattgtcaaggctagcagcggaccacgttatgttgttgcctgccgaagtaaagttgacaaagaaaagttgattgctggtacacgagttgttcttgacatgacaacacttaccattatgcgcattctgccacgtgaggtcgaccctgtggtttacaacatgctacatgaagatcctggcaatgtaagttactcagctgtaggtgggttgtcagatcaaataagggaactcagagaatccattgaattacctcttatgaacccagaattgtttctccgtgtcgggattaaaccgccgaagggcgtgctgctctacggtccacctggaactgggaagacgctcctagctagagccattgctagcaacattgatgctaattttttgaaggtggtgtcaagtgctatcattgataaatacattggtgaaagtgcacgcttaattcgtgaaatgtttaactatgcacgtgagcatcagccatgcatcattttcatggatgaaattgatgccattggtggccgaagatttagtgagggcacaagtgcagatcgtgagattcagaggacattgatggagcttctaaatcagttagatggattcgatgagcttgggaaggtgaaaatgatcatggcaaccaaccggcctgatgttttggatcctgcactccttcgacctggtcggttggacaggaagatcgagatcccactgccgaatgaacaagggaggatggaggtcctcaagattcatgcagctggcatcgcaaagcatggggagattgactatgaagctgtagtcaaactagctgagggcttcaatggagccgatatgcgcaacttgtgcacagaagccggcatggctgctatccgagcggagcgtgactatgtcattcacgaggacttcatgaaggctgtgcgcaagctgaatgatgccaagaagctcgagtccagtgcgcactacagtgctgacttcggcaaggattga

SEQ ID NO: 5923 - protein, 398 aa, Zea mays
MAEGGEEARRRAAIAEYRKKLLTCRELEARVKTGRENLKNAKKNLEKTEEDLKSLQSVGQIIGEVLRPLDKERFIVKASSGPRYVVACRSKVDKEKLIAGTRVVLDMTTLTIMRILPREVDPVVYNMLHEDPGNVSYSAVGGLSDQIRELRESIELPLMNPELFLRVGIKPPKGVLLYGPPGTGKTLLARAIASNIDANFLKVVSSAIIDKYIGESARLIREMFNYAREHQPCIIFMDEIDAIGGRRFSEGTSADREIQRTLMELLNQLDGFDELGKVKMIMATNRPDVLDPALLRPGRLDRKIEIPLPNEQGRMEVLKIHAAGIAKHGEIDYEAVVKLAEGFNGADMRNLCTEAGMAAIRAERDYVIHEDFMKAVRKLNDAKKLESSAHYSADFGKD

SEQ ID NO: 5924 - DNA, 1344 bp, Zea mays
  CDS (1)..(1344)
atggggcagggcactccgggagggatgggcaagcagggcggcgccggcgaccgcaagccgggggacgccggcgaaaagaaggacaagaagttcgagccgccggccgcgccctcccgcgtcggcaggaagcagcgcaagcagaagggcgccgaggccgccgcgcgcctccccaacgtcgcgccgctctccaagtgccgactccgcctcctcaagctcgaccgggtcaaggactacctcctcatggaggaggagttcgtcgccgcgcaggaacgcctccgtccccaggaagacaaggccgaggaggaccgatccaaggtcgacgacctccgaggcacccccatgagcgtcggatccctcgaggagatcatcgacgagagccacgccatcgtctcctcctctgtcggacccgagtactatgtcagcatcctctcctttgtcgacaaggaccagctcgagccgggatgctccatcctcatgcacaataaggttctttctgtggttggtatattgcaagatgaagttgatcctatggtatctgtgatgaaagttgagaaagcgcctttggaatcttatgctgacattggtggactggatgctcagattcaagaaattaaagaggctgttgagcttcccttgactcaccctgagctgtatgaagacattggtattaggcctcccaagggagtcatattatatggcgaacctggaactggaaaaactctactcgccaaggctgttgccaattcaacatctgcgactttcttgcgtgttgtcggtagtgaacttattcaaaagtaccttggggatggtcccaagctagtcagagaattgtttagggtggctgatgaactttctccctcaatagtctttattgatgagattgacgctgttggaacgaagaggtatgatgctcattcaggaggggagcgtgagattcaaagaactatgttggagctgctgaatcagctagatggttttgactcacgtggagatgttaaagtcattctagcaacaaaccgcattgaaagtcttgatcctgctttgcttcggccaggccgtatagaccggaagattgaattccctctaccagatattaaaactagaagacgcatcttccagatacacacatcaaaaatgacattagctgacgatgtgaacttggaagagtttgttatgaccaaagatgagttctcgggcgctgatattaaggccatctgcacggaggctggattgctcgccttaagagaacgtagaatgaaagtgacccatgcagatttcaagaaagcaaaggagaaggtgatgtacaagaagaaggaaggtgttccggatggtctctacatgtag

SEQ ID NO: 5925 - protein, 447 aa, Zea mays
MGQGTPGGMGKQGGAGDRKPGDAGEKKDKKFEPPAAPSRVGRKQRKQKGAEAAARLPNVAPLSKCRLRLLKLDRVKDYLLMEEEFVAAQERLRPQEDKAEEDRSKVDDLRGTPMSVGSLEEIIDESHAIVSSSVGPEYYVSILSFVDKDQLEPGCSILMHNKVLSVVGILQDEVDPMVSVMKVEKAPLESYADIGGLDAQIQEIKEAVELPLTHPELYEDIGIRPPKGVILYGEPGTGKTLLAKAVANSTSATFLRVVGSELIQKYLGDGPKLVRELFRVADELSPSIVFIDEIDAVGTKRYDAHSGGEREIQRTMLELLNQLDGFDSRGDVKVILATNRIESLDPALLRPGRIDRKIEFPLPDIKTRRRIFQIHTSKMTLADDVNLEEFVMTKDEFSGADIKAICTEAGLLALRERRMKVTHADFKKAKEKVMYKKKEGVPDGLYM

SEQ ID NO: 5926 - DNA, 1293 bp, Zea mays
  CDS (1)..(1293)
atgtcgtcatccggcgccccggccccggcggcggcaatggccgttgacgacgcggaggacgaccagctcgcctccatgtccacggaggatatcatccgggcctcccgccttcttgacaacgagatccgtgtcctcaaggacgagttgcagcggacgaacctggagttggagtcgttcaaggagaagattaaggaaaaccaagagaaaattaagctcaacaagcagctgccctacctcgttggcaacatcggtgagatcttggaaatgaaccctgaggatgaagctgaggaggatggtgctaacattgatttagactcacaaaggaaaggaaaatgtgttgttctgaagacctccacaagacaaactatattccttcctgttgttgggctagtggaccctgacaagctaaagcctggtgatctggttggagtcaataaagatagctaccttatactagatacattgccatcagagtacgattcacgagtgaaggcaatggaagtggatgaaaagcccactgaagattataatgacattgggggtcttgaaaagcagattcaagagcttgtagaggcaattgtactgcccatgacacataaagaccggttccagaagttgggtattcgtcctccaaaaggggttcttttgtacggaccaccaagaactggcaagacactcatggctcgtgcatgtgctgcacagacgaatgcaacgtttcttaaattaactggtccacaacttgtgcagatgtttattggtgatggaacaaagcttgtccgggatgcattccagcttgccaaagagaaagctccttggattatatttattgatgagatagatgccattggcaccaaacgttttgatagtgaagttagcggtgatagagaagttcagcggacaatgttggaattattgaatcaactggatggattcagcagcgatgagagaataaaggtcatagctgcaactaaccgtgctgacatccttgaccctgctctgatgcgatctggacggttggaccgaaagattgagttccctcacccatccgaagaagcaagagctagaatcttgcaaatccattcaaggaaaatgaatgtaaatcctgatgtcaactttgaagaattggctcgctcaactgatgacttcaacggagcacagctaaaggcagtttgtgtagaagctggtatgcttgccctacggcgggatgctacagaggtaactcacgaggatttcaacgaagggatcgtacaggtccaggcgaagaaaaagtcaagcttgaactactatgcttaa

SEQ ID NO: 5927 - protein, 430 aa, Zea mays
MSSSGAPAPAAAMAVDDAEDDQLASMSTEDIIRASRLLDNEIRVLKDELQRTNLELESFKEKIKENQEKIKLNKQLPYLVGNIGEILEMNPEDEAEEDGANIDLDSQRKGKCVVLKTSTRQTIFLPVVGLVDPDKLKPGDLVGVNKDSYLILDTLPSEYDSRVKAMEVDEKPTEDYNDIGGLEKQIQELVEAIVLPMTHKDRFQKLGIRPPKGVLLYGPPRTGKTLMARACAAQTNATFLKLTGPQLVQMFIGDGTKLVRDAFQLAKEKAPWIIFIDEIDAIGTKRFDSEVSGDREVQRTMLELLNQLDGFSSDERIKVIAATNRADILDPALMRSGRLDRKIEFPHPSEEARARILQIHSRKMNVNPDVNFEELARSTDDFNGAQLKAVCVEAGMLALRRDATEVTHEDFNEGIVQVQAKKKSSLNYYA

SEQ ID NO: 5928 - DNA, 1293 bp, Zea mays
  CDS (1)..(1293)
atgtcgtcatccggcgccccggccccggcggcggcaatggccgttgacgacgcggaggacgaccagctcgcctccatgtccacggaggatatcatccgggcctcccgccttcttgacaacgagatccgtgtcctcaaggacgagttgcagcggacgaacctggagttggagtcgttcaaggagaagattaaggaaaaccaagagaaaattaagctcaacaagcagctgccctacctcgttggcaacatcgttgagatcttggaaatgaaccctgaggatgaagctgaggaggatggtgctaacattgatttagactcacaaaggaaaggaaaatgtgttgttctgaagacctccacaagacaaactatattccttcctgttgttgggctagtggaccctgacaagctaaagcctggtgatctggttggagtcaataaagatagctaccttatactagatacattgccatcagagtacgattcacgagtgaaggcaatggaagtggatgaaaagcccactgaagattataatgacattgggggtcttgaaaagcagattcaagagcttgtagaggcaattgtactgcccatgacacataaagaccggttccagaagttgggtattcgtcctccaaaaggggttcttttgtacggaccaccaggaactggcaagacactcatggctcgtgcatgtgctgcacagacgaatgcaacgtttcttaaattagctggtccacaacttgtgcagatgtttattggtgatggagcaaagcttgtccgggatgcattccagcttgccaaagagaaagctccttgtattatatttattgatgagatagatgccattggcaccaaacgttttgatagtgaagttagcggtgatagagaagttcagcggacaatgttggaattattgaatcaactggatggattcagcagcgatgagagaataaaggtcatagctgcaactaaccgtgctgacatccttgaccctgctctgatgcgatctggacggttggaccgaaagattgagttccctcacccatccgaagaagcaagagctagaatcttgcaaatccattcaaggaaaatgaatgtaaatcctgatgtcaactttgaagaattggctcgctcaactgatgacttcaacggagcacagctaaaggcagtttgtgtagaagctggtatgcttgccctacggcgggatgctacagaggtaactcacgaggatttcaatgaagggatcgtacaggtccaggcgaagaaaaagtcaagcttgaactactatgcttaa

SEQ ID NO: 5929 - protein, 430 aa, Zea mays
MSSSGAPAPAAAMAVDDAEDDQLASMSTEDIIRASRLLDNEIRVLKDELQRTNLELESFKEKIKENQEKIKLNKQLPYLVGNIVEILEMNPEDEAEEDGANIDLDSQRKGKCVVLKTSTRQTIFLPVVGLVDPDKLKPGDLVGVNKDSYLILDTLPSEYDSRVKAMEVDEKPTEDYNDIGGLEKQIQELVEAIVLPMTHKDRFQKLGIRPPKGVLLYGPPGTGKTLMARACAAQTNATFLKLAGPQLVQMFIGDGAKLVRDAFQLAKEKAPCIIFIDEIDAIGTKRFDSEVSGDREVQRTMLELLNQLDGFSSDERIKVIAATNRADILDPALMRSGRLDRKIEFPHPSEEARARILQIHSRKMNVNPDVNFEELARSTDDFNGAQLKAVCVEAGMLALRRDATEVTHEDFNEGIVQVQAKKKSSLNYYA

SEQ ID NO: 5930 - DNA, 1263 bp, Zea mays
  CDS (1)..(1263)
atgtcggccgccaccaccggcccagccccttcagtagccactccgatggcgccccctccgtcctacccggcctcctccacggcctcttcctccatctccgcgtccgccgaggaggaggaggacctctatggccgcctcaaatcgctccaacgccacatggagttcgtcgaaatccaggaggagtacgttaaagacgagcagaagaacctgaagcgcgaactccttcgtgcgcaggaggaggttaagcggatccagtctgtaccgctcgtcattggccagtttatggagatggtcgacggcaacaacggcatcgtgggctctaccactggcagcaactactacgtgcggatcctcagcaccatcaaccgcgagttgctcaagccgtcagcgtccgtcgcgttgcatcgtcactccaacgctctagtcgacgtgctgccgccggaggccgactccagcatctccttgttgggatcgtcggagaagcccaacgtcacttacaacgatattggaggatgtgacatccaaaagcaagaaatacgggaggcggttgaattacccttgactcatcatgagttgtacaagcagattggtattgatcctccaagaggggtgcttctgtatggtcctccgggtactggcaagaccatgcttgccaaagcagttgcacatcataccactgctgcttttatcagggtcgtcggttcagagtttgttcaaaagtacttgggtgagggccctagaatggtgcgtgacgtgttccgtttggccaaggagaatgccccagcaatcattttcattgatgaggttgatgctatagccactgctcgttttgatgctcagactggtgctgaccgagaagttcagcgtattcttatggagctactcaatcagatggatgggtttgatcaaacagtcaatgtgaaggttataatggcaactaatcgggcagacactctagatcctgctttgttgcgtcctggtagacttgacaggaaaattgagttccctctgccagaccggcgtcagaagaggcttgtttttcaagtttgcactgccaaaatgaacctgagcgatgaggttgatttggaagattatgtttccagaccggataagatcagtgctgctgatattgctgctatctgccaagaggctggcatgcatgctgtccgcaaaaaccgatatgtcatcctccccaaggactttgaaaagggctaccgaaccaacgtgaagaagcccgagacagactttgatttctacaaatga

SEQ ID NO: 5931 - protein, 420 aa, Zea mays
MSAATTGPAPSVATPMAPPPSYPASSTASSSISASAEEEEDLYGRLKSLQRHMEFVEIQEEYVKDEQKNLKRELLRAQEEVKRIQSVPLVIGQFMEMVDGNNGIVGSTTGSNYYVRILSTINRELLKPSASVALHRHSNALVDVLPPEADSSISLLGSSEKPNVTYNDIGGCDIQKQEIREAVELPLTHHELYKQIGIDPPRGVLLYGPPGTGKTMLAKAVAHHTTAAFIRVVGSEFVQKYLGEGPRMVRDVFRLAKENAPAIIFIDEVDAIATARFDAQTGADREVQRILMELLNQMDGFDQTVNVKVIMATNRADTLDPALLRPGRLDRKIEFPLPDRRQKRLVFQVCTAKMNLSDEVDLEDYVSRPDKISAADIAAICQEAGMHAVRKNRYVILPKDFEKGYRTNVKKPETDFDFYK

SEQ ID NO: 5932 - DNA, 24 bp, Artificial sequence
  primer
atgggacaaggtgtatcatctgga

SEQ ID NO: 5933 - DNA, 27 bp, Artificial sequence
  primer
tcacaagtataaaccttctaaattttc

SEQ ID NO: 5934 - protein, 408 aa, Artificial sequence
  consensus sequence
  Variant (2)..(4): Xaa in position 2 to 4 is any amino acid
  Variant (6)..(15): Xaa in position 6 to 15 is any amino acid
  Variant (16)..(38): Xaa in position 16 to 38 is any or no amino acid
  Variant (40)..(47): Xaa in position 40 to 47 is any amino acid
  Variant (48)..(50): Xaa in position 48 to 50 is any or no amino acid
  Variant (52)..(52): Xaa in position 52 is any amino acid
  Variant (53)..(58): Xaa in position 53 to 58 is any or no amino acid
  Variant (60)..(61): Xaa in position 60 to 61 is any amino acid
  Variant (62)..(62): Xaa in position 62 is any or no amino acid
  Variant (64)..(64): Xaa in position 64 is any amino acid
  Variant (66)..(68): Xaa in position 66 to 68 is any amino acid
  Variant (70)..(73): Xaa in position 70 to 73 is any amino acid
  Variant (74)..(115): Xaa in position 74 to 115 is any or no amino acid
  Variant (117)..(120): Xaa in position 117 to 120 is any amino acid
  Variant (121)..(121): Xaa in position 121 is any or no amino acid
  Variant (123)..(133): Xaa in position 123 to 133 is any amino acid
  Variant (134)..(136): Xaa in position 134 to 136 is any or no amino acid
  Variant (138)..(140): Xaa in position 138 to 140 is any amino acid
  Variant (142)..(144): Xaa in position 142 to 144 is any amino acid
  Variant (148)..(149): Xaa in position 148 to 149 is any amino acid
  Variant (151)..(152): Xaa in position 151 to 152 is any amino acid
  Variant (154)..(155): Xaa in position 154 to 155 is any amino acid
  Variant (157)..(158): Xaa in position 157 to 158 is any amino acid
  Variant (163)..(171): Xaa in position 163 to 171 is any amino acid
  Variant (174)..(174): Xaa in position 174 is any amino acid
  Variant (177)..(177): Xaa in position 177 is any amino acid
  Variant (178)..(179): Xaa in position 178 to 179 is any or no amino acid
  Variant (182)..(182): Xaa in position 182 is any amino acid
  Variant (186)..(186): Xaa in position 186 is any amino acid
  Variant (193)..(193): Xaa in position 193 is any amino acid
  Variant (196)..(196): Xaa in position 196 is any amino acid
  Variant (200)..(201): Xaa in position 200 to 201 is any amino acid
  Variant (203)..(203): Xaa in position 203 is any amino acid
  Variant (205)..(205): Xaa in position 205 is any amino acid
  Variant (207)..(210): Xaa in position 207 to 210 is any amino acid
  Variant (214)..(215): Xaa in position 214 to 215 is any amino acid
  Variant (219)..(219): Xaa in position 219 is any amino acid
  Variant (221)..(221): Xaa in position 221 is any amino acid
  Variant (223)..(225): Xaa in position 223 to 225 is any amino acid
  Variant (228)..(229): Xaa in position 228 to 229 is any amino acid
  Variant (231)..(232): Xaa in position 231 to 232 is any amino acid
  Variant (234)..(237): Xaa in position 234 to 237 is any amino acid
  Variant (239)..(239): Xaa in position 239 is any amino acid
  Variant (241)..(241): Xaa in position 241 is any amino acid
  Variant (249)..(252): Xaa in position 249 to 252 is any amino acid
  Variant (254)..(259): Xaa in position 254 to 259 is any amino acid
  Variant (260)..(264): Xaa in position 260 to 264 is any or no amino acid
  Variant (267)..(267): Xaa in position 267 is any amino acid
  Variant (270)..(272): Xaa in position 270 to 272 is any amino acid
  Variant (276)..(276): Xaa in position 276 is any amino acid
  Variant (278)..(278): Xaa in position 278 is any amino acid
  Variant (282)..(287): Xaa in position 282 to 287 is any amino acid
  Variant (288)..(288): Xaa in position 288 is any or no amino acid
  Variant (290)..(290): Xaa in position 290 is any amino acid
  Variant (292)..(292): Xaa in position 292 is any amino acid
  Variant (297)..(299): Xaa in position 297 to 299 is any amino acid
  Variant (305)..(305): Xaa in position 305 is any amino acid
  Variant (310)..(310): Xaa in position 310 is any amino acid
  Variant (316)..(316): Xaa in position 316 is any amino acid
  Variant (318)..(318): Xaa in position 318 is any amino acid
  Variant (319)..(319): Xaa in position 319 is any or no amino acid
  Variant (321)..(327): Xaa in position 321 to 327 is any amino acid
  Variant (329)..(335): Xaa in position 329 to 335 is any amino acid
  Variant (337)..(354): Xaa in position 337 to 354 is any amino acid
  Variant (355)..(357): Xaa in position 355 to 357 is any or no amino acid
  Variant (360)..(366): Xaa in position 360 to 366 is any amino acid
  Variant (367)..(368): Xaa in position 367 to 368 is any or no amino acid
  Variant (371)..(390): Xaa in position 371 to 390 is any amino acid
  Variant (392)..(393): Xaa in position 392 to 393 is any amino acid
  Variant (395)..(395): Xaa in position 395 is any amino acid
  Variant (397)..(398): Xaa in position 397 to 398 is any amino acid
  Variant (400)..(401): Xaa in position 400 to 401 is any amino acid
  Variant (402)..(406): Xaa in position 402 to 406 is any or no amino acid
PXXXGXXXXXXXXXXXXXXXXXXXXXXXXXXXXXXXXXVXXXXXXXXXXXVXXXXXXXDXXXLXPXXXVXXXXXXXXXXXXXXXXXXXXXXXXXXXXXXXXXXXXXXXXXXXXXXLXXXXXDXXXXXXXXXXXXXXPXXXYXXXGGLXXQXXEXXEXXELPLXXXXXXXXXGIXPPXXXGVXLYGXPGTGKTXLAXAVAXXTXAXFXXXXGSEXXQKYXGXGXXXVRXXFXXAXXXXPXIXFIDEIDAXXXXRXXXXXXXXXXXREXQRXXXELLXQXDGFXXXXXXXKXIXATNRXXXLDPALXRPGRXDRKIEXPXXPXXXXXXXIXXXXXXXMXXXXXXXXXXXXXXXXXXXXXGAXXXXXXXXXEAXXXXXXXXXXXXXXXXXXXXGXXAXRXXRXXXXXXXDF

SEQ ID NO: 5935 - protein, 45 aa, Artificial sequence
  protein pattern
  Variant (2)..(4): Xaa in position 2 to 4 is any amino acid
  Variant (6)..(6): Xaa in position 6 is any amino acid
  Variant (9)..(9): Xaa in position 9 is any or no amino acid
  Variant (11)..(11): Xaa in position 11 is any or no amino acid
  Variant (14)..(14): Xaa in position 14 is any amino acid
  Variant (17)..(17): Xaa in position 17 is Cys or Thr
  Variant (21)..(21): Xaa in position 21 is Leu or Met
  Variant (23)..(23): Xaa in position 23 is Ala, Thr or Val
  Variant (24)..(24): Xaa in position 24 is any amino acid
  Variant (26)..(26): Xaa in position 26 is Ile or Val
  Variant (28)..(31): Xaa in position 28 to 31 is any amino acid
  Variant (32)..(32): Xaa in position 32 is Ala, Cys or Thr
  Variant (33)..(33): Xaa in position 33 is any amino acid
  Variant (35)..(35): Xaa in position 35 is Ile, Leu, Met or Val
  Variant (36)..(38): Xaa in position 36 to 38 is any amino acid
  Variant (39)..(39): Xaa in position 39 is Ala, Gly or Ser
  Variant (41)..(41): Xaa in position 41 is Ala, Asp, Glu or Gly
  Variant (42)..(42): Xaa in position 42 is Phe, Ile or Leu
  Variant (43)..(43): Xaa in position 43 is Ala, Ile or Val
  Variant (44)..(44): Xaa in position 44 is any amino acid
GXXXPXGVXLXYGXPGXGKTXLXXAXAXXXXXXFXXXXXSXXXXK

SEQ ID NO: 5936 - protein, 33 aa, Artificial sequence
  protein pattern
  Variant (2)..(2): Xaa in position 2 is Ile, Met or Val
  Variant (3)..(3): Xaa in position 3 is Ile, Leu or Val
  Variant (4)..(4): Xaa in position 4 is any amino acid
  Variant (8)..(8): Xaa in position 8 is Lys or Arg
  Variant (9)..(9): Xaa in position 9 is any amino acid
  Variant (10)..(10): Xaa in position 10 is Asp, Glu, Asn or Ser
  Variant (11)..(11): Xaa in position 11 is any amino acid
  Variant (17)..(17): Xaa in position 17 is Ile, Leu or Met
  Variant (19)..(19): Xaa in position 19 is Ala, Pro, Ser or Thr
  Variant (22)..(22): Xaa in position 22 is Phe, Ile, Leu or Met
  Variant (25)..(26): Xaa in position 25 to 26 is any amino acid
  Variant (27)..(28): Xaa in position 27 to 28 is any or no amino acid
  Variant (30)..(30): Xaa in position 30 is any amino acid
  Variant (31)..(32): Xaa in position 31 to 32 is any or no amino acid
KXXXATNXXXXLDPALXRXGRXDRXXXXEXXXP

SEQ ID NO: 5937 - protein, 30 aa, Artificial sequence
  protein pattern
  Variant (2)..(2): Xaa in position 2 is Ala, Pro or Ser
  Variant (3)..(3): Xaa in position 3 is Lys or Arg
  Variant (4)..(4): Xaa in position 4 is Leu or Met
  Variant (5)..(5): Xaa in position 5 is Cys or Val
  Variant (6)..(6): Xaa in position 6 is His, Lys or Arg
  Variant (7)..(7): Xaa in position 7 is Asp, Glu or Gln
  Variant (8)..(8): Xaa in position 8 is any amino acid
  Variant (10)..(11): Xaa in position 10 to 11 is any amino acid
  Variant (13)..(16): Xaa in position 13 to 16 is any amino acid
  Variant (18)..(18): Xaa in position 18 is Ala, Cys, Ser or Thr
  Variant (20)..(20): Xaa in position 20 is Gly, Ile, Leu or Val
  Variant (22)..(24): Xaa in position 22 to 24 is any or no amino acid
  Variant (27)..(27): Xaa in position 27 is Ala, Glu or Ser
  Variant (28)..(28): Xaa in position 28 is Ile, Leu or Val
  Variant (29)..(29): Xaa in position 29 is Ala, Asp or Gly
  Variant (30)..(30): Xaa in position 30 is Ala, Ser or Thr
GXXXXXXXFXXAXXXXPXIXFXXXIDXXXX

SEQ ID NO: 5938 - protein, 17 aa, Artificial sequence
  protein pattern
  Variant (3)..(3): Xaa in position 3 is Ile or Val
  Variant (4)..(4): Xaa in position 4 is Asn or Gln
  Variant (6)..(6): Xaa in position 6 is any amino acid
  Variant (7)..(7): Xaa in position 7 is Leu or Met
  Variant (8)..(8): Xaa in position 8 is Ile, Leu or Met
  Variant (9)..(9): Xaa in position 9 is Glu or Gln
  Variant (12)..(12): Xaa in position 12 is Ala, Asn or Thr
  Variant (13)..(13): Xaa in position 13 is Ala, Glu or Gln
  Variant (14)..(14): Xaa in position 14 is Ile, Leu or Met
REXXRXXXXLLXXXDGF

SEQ ID NO: 5939 - protein, 15 aa, Artificial sequence
  protein pattern
  Variant (3)..(3): Xaa in position 3 is any amino acid
  Variant (4)..(4): Xaa in position 4 is Ile or Leu
  Variant (5)..(5): Xaa in position 5 is any amino acid
  Variant (6)..(6): Xaa in position 6 is Ala, Gly, Asn or Ser
  Variant (7)..(7): Xaa in position 7 is Ile, Leu, Met or Val
  Variant (8)..(9): Xaa in position 8 to 9 is any amino acid
  Variant (13)..(14): Xaa in position 13 to 14 is any amino acid
GAXXXXXXXEAGXXA

SEQ ID NO: 5940 - protein, 31 aa, Artificial sequence
  protein pattern
  Variant (2)..(3): Xaa in position 2 to 3 is any amino acid
  Variant (4)..(5): Xaa in position 4 to 5 is any or no amino acid
  Variant (7)..(17): Xaa in position 7 to 17 is any amino acid
  Variant (18)..(19): Xaa in position 18 to 19 is any or no amino acid
  Variant (21)..(23): Xaa in position 21 to 23 is any amino acid
  Variant (25)..(25): Xaa in position 25 is Ala, Asp, Glu, Asn, Gln, Ser or Thr
  Variant (26)..(26): Xaa in position 26 is any amino acid
  Variant (27)..(27): Xaa in position 27 is Ile or Val
  Variant (30)..(30): Xaa in position 30 is any amino acid
  Variant (31)..(31): Xaa in position 31 is Asp, Glu or Lys
LXXXXDXXXXXXXXXXXXXPXXXYXXXGGXX

SEQ ID NO: 5941 - DNA, 537 bp, Glycine max
  CDS (1)..(537)
atggaaccgcgttcgggtcggcgaatcgtcgacttcgtaaccataaccgtcttctccctcgcactccttgccgttttgacaggttttggtggtggtgggactctcaccgtagccatggcggtgtccgtgacgcgtggttcggagaaaggaaccgtcgctagttcgcatcgcaaactccttaccagtgacaatggaaatgaaagagtggaaccaaaccgaatatggggcgagaaatgcagcaaaactgatatagtgataaaccaaggccccacagcacctctcccaagtggcattccaacctacacagtagagataatgaacatgtgcgtcagtggatgcgacatctctaaaatacacctcagatgcggctggttcagctctgcacgcctaatcaaccccaagctcttcaagcgcctccgttacaacgactgcctcgtcaatgatggcaggcccttgatcaacggtgccaccatttcattccaatatgccaacaccttcctctaccctctctcagtttcctctgttgtctgtgtatga

SEQ ID NO: 5942 - protein, 178 aa, Glycine max
MEPRSGRRIVDFVTITVFSLALLAVLTGFGGGGTLTVAMAVSVTRGSEKGTVASSHRKLLTSDNGNERVEPNRIWGEKCSKTDIVINQGPTAPLPSGIPTYTVEIMNMCVSGCDISKIHLRCGWFSSARLINPKLFKRLRYNDCLVNDGRPLINGATISFQYANTFLYPLSVSSVVCV

SEQ ID NO: 5943 - DNA, 774 bp, Zea mays; identical to SEQ ID NO: 5243
  CDS (41)..(550)

SEQ ID NO: 5944 - protein, 169 aa, Zea mays; identical to SEQ ID NO: 5244

SEQ ID NO: 5945 - DNA, 510 bp, Oryza sativa; identical to SEQ ID NO: 5245
  CDS (1)..(510)

SEQ ID NO: 5946 - protein, 169 aa, Oryza sativa; identical to SEQ ID NO: 5246

SEQ ID NO: 5947 - DNA, 561 bp, Glycine max; identical to SEQ ID NO: 5247
  CDS (1)..(561)

SEQ ID NO: 5948 - protein, 186 aa, Glycine max; identical to SEQ ID NO: 5248

SEQ ID NO: 5949 - DNA, 540 bp, Arabidopsis thaliana; identical to SEQ ID NO: 5249
  CDS (1)..(540)

SEQ ID NO: 5950 - protein, 179 aa, Arabidopsis thaliana; identical to SEQ ID NO: 5250

SEQ ID NO: 5951 - DNA, 531 bp, Arabidopsis thaliana; identical to SEQ ID NO: 5251
  CDS (1)..(531)

SEQ ID NO: 5952 - protein, 176 aa, Arabidopsis thaliana; identical to SEQ ID NO: 5252

SEQ ID NO: 5953 - DNA, 507 bp, Vitis vinifera; identical to SEQ ID NO: 5253
  CDS (1)..(507)

SEQ ID NO: 5954 - protein, 168 aa, Vitis vinifera; identical to SEQ ID NO: 5254

SEQ ID NO: 5955 - DNA, 537 bp, Populus trichocarpa; identical to SEQ ID NO: 5255
  CDS (1)..(537)

SEQ ID NO: 5956 - protein, 178 aa, Populus trichocarpa; identical to SEQ ID NO: 5256

SEQ ID NO: 5957 - DNA, 543 bp, Elaeis guineensis var. tenera; identical to SEQ ID NO: 5257
  CDS (1)..(543)

SEQ ID NO: 5958 - protein, 180 aa, Elaeis guineensis var. tenera; identical to SEQ ID NO: 5258

SEQ ID NO: 5959 - DNA, 609 bp, Oryza sativa subsp. japonica; identical to SEQ ID NO: 5259
  CDS (1)..(609)

SEQ ID NO: 5960 - protein, 202 aa, Oryza sativa subsp. japonica; identical to SEQ ID NO: 5260

SEQ ID NO: 5961 - DNA, 519 bp, Brassica napus; identical to SEQ ID NO: 5261
  CDS (1)..(519)

SEQ ID NO: 5962 - protein, 172 aa, Brassica napus; identical to SEQ ID NO: 5262

SEQ ID NO: 5963 - DNA, 516 bp, Brassica napus; identical to SEQ ID NO: 5263
  CDS (1)..(516)

SEQ ID NO: 5964 - protein, 171 aa, Brassica napus; identical to SEQ ID NO: 5264

SEQ ID NO: 5965 - DNA, 537 bp, Glycine max; identical to SEQ ID NO: 5265
  CDS (1)..(537)

SEQ ID NO: 5966 - protein, 178 aa, Glycine max; identical to SEQ ID NO: 5266

SEQ ID NO: 5967 - DNA, 510 bp, Zea mays; identical to SEQ ID NO: 5267
  CDS (1)..(510)

SEQ ID NO: 5968 - protein, 169 aa, Zea mays; identical to SEQ ID NO: 5268

SEQ ID NO: 5969 - DNA, 20 bp, Artificial sequence
  primer
atggaaccgcgttcggttcg

SEQ ID NO: 5970 - DNA, 20 bp, Artificial sequence
  primer
tcatacacagacaacagagg

SEQ ID NO: 5971 - protein, 159 aa, Artificial sequence; identical to SEQ ID NO: 5271
  consensus sequence
  Variant (2)..(26): Xaa in position 2 to 26 is any amino acid
  Variant (27)..(45): Xaa in position 27 to 45 is any or no amino acid
  Variant (47)..(54): Xaa in position 47 to 54 is any amino acid
  Variant (55)..(59): Xaa in position 55 to 59 is any or no amino acid
  Variant (61)..(62): Xaa in position 61 to 62 is any amino acid
  Variant (64)..(67): Xaa in position 64 to 67 is any amino acid
  Variant (69)..(69): Xaa in position 69 is any amino acid
  Variant (71)..(71): Xaa in position 71 is any amino acid
  Variant (75)..(75): Xaa in position 75 is any amino acid
  Variant (77)..(77): Xaa in position 77 is any amino acid
  Variant (79)..(79): Xaa in position 79 is any amino acid
  Variant (81)..(81): Xaa in position 81 is any amino acid
  Variant (83)..(83): Xaa in position 83 is any amino acid
  Variant (85)..(86): Xaa in position 85 to 86 is any amino acid
  Variant (87)..(87): Xaa in position 87 is any or no amino acid
  Variant (89)..(93): Xaa in position 89 to 93 is any amino acid
  Variant (95)..(96): Xaa in position 95 to 96 is any amino acid
  Variant (99)..(99): Xaa in position 99 is any amino acid
  Variant (101)..(101): Xaa in position 101 is any amino acid
  Variant (103)..(104): Xaa in position 103 to 104 is any amino acid
  Variant (106)..(107): Xaa in position 106 to 107 is any amino acid
  Variant (109)..(110): Xaa in position 109 to 110 is any amino acid
  Variant (112)..(112): Xaa in position 112 is any amino acid
  Variant (114)..(117): Xaa in position 114 to 117 is any amino acid
  Variant (122)..(123): Xaa in position 122 to 123 is any amino acid
  Variant (125)..(126): Xaa in position 125 to 126 is any amino acid
  Variant (128)..(133): Xaa in position 128 to 133 is any amino acid
  Variant (136)..(136): Xaa in position 136 is any amino acid
  Variant (138)..(138): Xaa in position 138 is any amino acid
  Variant (140)..(140): Xaa in position 140 is any amino acid
  Variant (142)..(142): Xaa in position 142 is any amino acid
  Variant (144)..(144): Xaa in position 144 is any amino acid
  Variant (145)..(151): Xaa in position 145 to 151 is any or no amino acid
  Variant (153)..(153): Xaa in position 153 is any amino acid
  Variant (155)..(156): Xaa in position 155 to 156 is any amino acid
  Variant (158)..(158): Xaa in position 158 is any amino acid

SEQ ID NO: 5972 - protein, 60 aa, Artificial sequence; identical to SEQ ID NO: 5272
  protein pattern
  Variant (2)..(2): Xaa in position 2 is any amino acid
  Variant (3)..(3): Xaa in position 3 is Ile or Val
  Variant (4)..(5): Xaa in position 4 to 5 is any amino acid
  Variant (6)..(6): Xaa in position 6 is Ile or Val
  Variant (8)..(8): Xaa in position 8 is Ile, Leu or Val
  Variant (9)..(9): Xaa in position 9 is Asn, Arg or Ser
  Variant (12)..(12): Xaa in position 12 is any amino acid
  Variant (14)..(14): Xaa in position 14 is any or no amino acid
  Variant (16)..(17): Xaa in position 16 to 17 is any amino acid
  Variant (18)..(18): Xaa in position 18 is any or no amino acid
  Variant (20)..(20): Xaa in position 20 is Ile or Val
  Variant (21)..(21): Xaa in position 21 is Asp or Asn
  Variant (23)..(24): Xaa in position 23 to 24 is any amino acid
  Variant (26)..(26): Xaa in position 26 is any amino acid
  Variant (28)..(28): Xaa in position 28 is Ile or Leu
  Variant (29)..(29): Xaa in position 29 is any amino acid
  Variant (30)..(30): Xaa in position 30 is Phe or Tyr
  Variant (31)..(31): Xaa in position 31 is Asp or Asn
  Variant (36)..(36): Xaa in position 36 is any amino acid
  Variant (37)..(37): Xaa in position 37 is Asp, Gly or Asn
  Variant (39)..(40): Xaa in position 39 to 40 is any amino acid
  Variant (42)..(43): Xaa in position 42 to 43 is any amino acid
  Variant (44)..(44): Xaa in position 44 is Gly or Ser
  Variant (45)..(45): Xaa in position 45 is Ala, Glu, Gly, Gln or Ser
  Variant (46)..(46): Xaa in position 46 is any amino acid
  Variant (47)..(47): Xaa in position 47 is Ile, Leu or Val
  Variant (48)..(48): Xaa in position 48 is Ser or Thr
  Variant (50)..(50): Xaa in position 50 is any amino acid
  Variant (52)..(52): Xaa in position 52 is Ala or Ser
  Variant (54)..(58): Xaa in position 54 to 58 is any amino acid
  Variant (59)..(59): Xaa in position 59 is any or no amino acid

SEQ ID NO: 5973 - protein, 24 aa, Artificial sequence
  protein pattern
  Variant (2)..(2): Xaa in position 2 is Ala, Gly, Asn or Ser
  Variant (3)..(3): Xaa in position 3 is Ala, Asn, Pro or Ser
  Variant (4)..(4): Xaa in position 4 is Ala or Thr
  Variant (5)..(5): Xaa in position 5 is Ala, Glu, Asn or Ser
  Variant (6)..(6): Xaa in position 6 is any amino acid
  Variant (7)..(7): Xaa in position 7 is Leu or Met
  Variant (8)..(8): Xaa in position 8 is Pro or Ser
  Variant (9)..(9): Xaa in position 9 is Asn or Ser
  Variant (13)..(14): Xaa in position 13 to 14 is any or no amino acid
  Variant (16)..(17): Xaa in position 16 to 17 is any or no amino acid
  Variant (19)..(19): Xaa in position 19 is Glu or Gln
  Variant (20)..(20): Xaa in position 20 is Ile or Val
  Variant (21)..(21): Xaa in position 21 is any amino acid
  Variant (23)..(23): Xaa in position 23 is any amino acid
QXXXXXXXXGIPXXTXXVXXXNXC

SEQ ID NO: 5974 - DNA, 3402 bp, Saccharomyces cerevisiae
  CDS (1)..(3402)
atgctaagaacaagaaccacaaagacccttagcacagtggcgaggaccacaagagctatccaatattaccgatctatcgctaagactgctgcagtttctcaaagaaggttcgcatcgaccttgaccgtgcgtgacgtagagaatatcaaacctagccatattattaagagtccaacatggcaagagttccagcatcaattgaaggatccaaggtacatggaacactttgcacaacttgatgcacagtttgctcggcatttcatggctacaaacagcggcaaaagtattctggcgaaagatgatagtacatctcagaaaaaggatgaagatgtcaagatagtacctgatgaaaaagatacagacaatgatgttgagcccacgcgagatgatgaaattgttaataaggaccaagaaggtgaagcttcgaaaaactccagaagctccgcttctggaggtggacagtcatcatccagtcgatcggattctggagatggaagttcgaaacaaaagcctccaaaggatgtaccagaagtatacccgcaaatgctagcattaccaatagccagacggcccttatttccagggttctacaaggcggttgtgatatcggacgaaagagttatgaaggcaatcaaggaaatgttagaccgccagcaaccctacattggcgctttcatgttgaagaactcggaagaagatactgatgtaatcacagataaaaatgatgtatacgatgttggtgttctggctcaaataactagcgctttcccgagtaaagacgaaaagacgggcactgaaacaatgactgctcttttatatcctcacaggagaataaaaattgatgaattatttccaccaaacgaggaaaaggaaaaatcaaaagaacaagcaaaggatacggatactgaaacgaccgtcgttgaagacgctaacaacccagaagaccaagaaagcaccagccctgctacgcctaagttggaggatattgtggtggagaggataccagactcagaattgcaacatcataagagagtagaagccactgaagaagagtctgaagaattagacgatattcaagaaggtgaggacattaaccccacagaattcttaaaaaattataatgtttcccttgtcaatgtgttgaatttagaagatgaaccgtttgatagaaagtcacccgttattaatgcgctaacatcagaaatattgaaggtatttaaagaaatttctcaattgaacacgatgttcagagaacaaattgcaactttttctgcttcaattcaatctgcgaccacgaacatttttgaggaaccagctagattggcagattttgccgctgctgtttctgccggcgaagaagacgaattacaagacatactgtcatctttaaacattgagcacagactagaaaagtcgctactagtccttaagaaagaattgatgaatgccgaattacagaacaaaatctccaaagatgtagagacaaagattcaaaagagacaaagagaatactatttgatggaacaattaaagggcatcaaaagagaattaggtattgacgacggccgtgacaaattgattgacacttataaagaaagaatcaagtcattaaaattgcctgatagcgttcaaaaaattttcgatgatgagataactaaattaagtaccttggagacttctatgtccgaatttggcgttatcagaaactatttggattggttaacatcgatcccatggggaaaacattccaaagaacagtattccattccgagagcaaagaaaattttagatgaagatcattatggtatggtagatgtcaaggatcgtatcttggagtttattgccgtcggtaaactattgggtaaagtcgatggtaaaatcatatgtttcgtaggacccccaggtgttggtaaaacgtccataggtaaatctatcgctagagctcttaacaggaaattcttccgattttctgtaggcggtatgacggacgtggcagaaataaaaggtcataggagaacgtatattggtgccttacctggcagagtagttcaagcattaaagaagtgccaaactcaaaatcctttgattttgatagatgaaatcgataagattggacacggcggcatacacggcgatccgtccgcggcattgttagaagtattggaccctgaacaaaacaacagcttcttggataactacttggatattcctattgacttatcaaaagtgcttttcgtttgcactgctaactctttggaaactattccaagacctttactggatcgtatggaagtcattgagttgacaggatatgttgctgaagacaaggttaagattgccgagcagtatttagttccaagtgccaagaaaagcgctggtctagaaaactctcatgttgatatgacagaagatgcaataacagcgttaatgaagtactactgtagagaaagtggtgtaaggaatttgaaaaaacacatcgagaaaatataccgtaaagcagccctacaagtggtaaagaagttgagtattgaagattccccaacgccatcagccgacagcaagcctaaagaaagcgtttcttccgaagaaaaggcggaaaataacgccaaaagctcatcggagaagactaaggacaataattcggaaaagacaagcgatgacattgaagccttaaagacctctgaaaagatcaatgtttccatatcccagaaaaacctaaaagattacgttgggcctccagtctacactacagaccggttatacgaaacaactccaccaggggtagttatggggttggcgtggactaatatgggaggttgctcactttatgtagaatctgtccttgaacaacctttacacaactgcaagcatccaacatttgaaaggaccgggcaactgggagatgttatgaaggaatcatcaaggcttgcttattcattcgccaagatgtatttagcacaaaaattccctgagaacagattttttgaaaaggcgtctatccacttgcattgtcctgaaggtgctacccctaaagatggtccatctgcaggtgtcactatggccacttccttcctttccctagcattgaataagtcgattgacccaacggttgcgatgaccggtgaattgacacttaccggtaaagttttacgtatcggtgggttgagagaaaaagctgtggccgctaaaagatctagtgccaagactattattttccctaaagataacttaaatgattgggaggaacttccagacaatgtaaaggaagggttggaacctttagctgctgattggtataatgatatattccaaaaattattcaaggatgtgaatacgaaagaaggtaattcagtatggaaggctgaatttgagattttggatgctaaaaaggaaaaggactaa

SEQ ID NO: 5975 - protein, 1133 aa, Saccharomyces cerevisiae
MLRTRTTKTLSTVARTTRAIQYYRSIAKTAAVSQRRFASTLTVRDVENIKPSHIIKSPTWQEFQHQLKDPRYMEHFAQLDAQFARHFMATNSGKSILAKDDSTSQKKDEDVKIVPDEKDTDNDVEPTRDDEIVNKDQEGEASKNSRSSASGGGQSSSSRSDSGDGSSKQKPPKDVPEVYPQMLALPIARRPLFPGFYKAVVISDERVMKAIKEMLDRQQPYIGAFMLKNSEEDTDVITDKNDVYDVGVLAQITSAFPSKDEKTGTETMTALLYPHRRIKIDELFPPNEEKEKSKEQAKDTDTETTVVEDANNPEDQESTSPATPKLEDIVVERIPDSELQHHKRVEATEEESEELDDIQEGEDINPTEFLKNYNVSLVNVLNLEDEPFDRKSPVINALTSEILKVFKEISQLNTMFREQIATFSASIQSATTNIFEEPARLADFAAAVSAGEEDELQDILSSLNIEHRLEKSLLVLKKELMNAELQNKISKDVETKIQKRQREYYLMEQLKGIKRELGIDDGRDKLIDTYKERIKSLKLPDSVQKIFDDEITKLSTLETSMSEFGVIRNYLDWLTSIPWGKHSKEQYSIPRAKKILDEDHYGMVDVKDRILEFIAVGKLLGKVDGKIICFVGPPGVGKTSIGKSIARALNRKFFRFSVGGMTDVAEIKGHRRTYIGALPGRVVQALKKCQTQNPLILIDEIDKIGHGGIHGDPSAALLEVLDPEQNNSFLDNYLDIPIDLSKVLFVCTANSLETIPRPLLDRMEVIELTGYVAEDKVKIAEQYLVPSAKKSAGLENSHVDMTEDAITALMKYYCRESGVRNLKKHIEKIYRKAALQVVKKLSIEDSPTPSADSKPKESVSSEEKAENNAKSSSEKTKDNNSEKTSDDIEALKTSEKINVSISQKNLKDYVGPPVYTTDRLYETTPPGVVMGLAWTNMGGCSLYVESVLEQPLHNCKHPTFERTGQLGDVMKESSRLAYSFAKMYLAQKFPENRFFEKASIHLHCPEGATPKDGPSAGVTMATSFLSLALNKSIDPTVAMTGELTLTGKVLRIGGLREKAVAAKRSSAKTIIFPKDNLNDWEELPDNVKEGLEPLAADWYNDIFQKLFKDVNTKEGNSVWKAEFEILDAKKEKD

SEQ ID NO: 5976 - DNA, 3125 bp, Glycine max; identical to SEQ ID NO: 3159
  CDS (1)..(2925)

SEQ ID NO: 5977 - protein, 974 aa, Glycine max; identical to SEQ ID NO: 3160

SEQ ID NO: 5978 - DNA, 2847 bp, Oryza sativa Japonica Group; identical to SEQ ID NO: 3161
  CDS (1)..(2847)

SEQ ID NO: 5979 - protein, 948 aa, Oryza sativa Japonica Group; identical to SEQ ID NO: 3162

SEQ ID NO: 5980 - DNA, 2958 bp, Arabidopsis thaliana (thale cress); identical to SEQ ID NO: 3163
  CDS (1)..(2958)

SEQ ID NO: 5981 - protein, 985 aa, Arabidopsis thaliana (thale cress); identical to SEQ ID NO: 3164

SEQ ID NO: 5982 - DNA, 3021 bp, Drosophila melanogaster (fruit fly); identical to SEQ ID NO: 3165
  CDS (1)..(3021)

SEQ ID NO: 5983 - protein, 1006 aa, Drosophila melanogaster (fruit fly); identical to SEQ ID NO: 3166

SEQ ID NO: 5984 - DNA, 2925 bp, Drosophila pseudoobscura pseudoobscura; identical to SEQ ID NO: 3167
  CDS (1)..(2925)

SEQ ID NO: 5985 - protein, 974 aa, Drosophila pseudoobscura pseudoobscura; identical to SEQ ID NO: 3168

SEQ ID NO: 5986 - DNA, 2940 bp, Nasonia vitripennis (jewel wasp); identical to SEQ ID NO: 3169
  CDS (1)..(2940)

SEQ ID NO: 5987 - protein, 979 aa, Nasonia vitripennis (jewel wasp); identical to SEQ ID NO: 3170

SEQ ID NO: 5988 - DNA, 2706 bp, Physcomitrella patens subsp. patens; identical to SEQ ID NO: 3173
  CDS (1)..(2706)

SEQ ID NO: 5989 - protein, 901 aa, Physcomitrella patens subsp. patens; identical to SEQ ID NO: 3174

SEQ ID NO: 5990 - DNA, 2799 bp, Acyrthosiphon pisum (pea aphid); identical to SEQ ID NO: 3175
  CDS (1)..(2799)

SEQ ID NO: 5991 - protein, 932 aa, Acyrthosiphon pisum (pea aphid); identical to SEQ ID NO: 3176

SEQ ID NO: 5992 - DNA, 3018 bp, Drosophila ananassae; identical to SEQ ID NO: 3177
  CDS (1)..(3018)

SEQ ID NO: 5993 - protein, 1005 aa, Drosophila ananassae; identical to SEQ ID NO: 3178

SEQ ID NO: 5994 - DNA, 3024 bp, Drosophila erecta; identical to SEQ ID NO: 3179
  CDS (1)..(3024)

SEQ ID NO: 5995 - protein, 1007 aa, Drosophila erecta; identical to SEQ ID NO: 3180

SEQ ID NO: 5996 - DNA, 3000 bp, Drosophila grimshawi; identical to SEQ ID NO: 3181
  CDS (1)..(3000)

SEQ ID NO: 5997 - protein, 999 aa, Drosophila grimshawi; identical to SEQ ID NO: 3182

SEQ ID NO: 5998 - DNA, 2886 bp, Drosophila persimilis; identical to SEQ ID NO: 3185
  CDS (1)..(2886)

SEQ ID NO: 5999 - protein, 961 aa, Drosophila persimilis; identical to SEQ ID NO: 3186

SEQ ID NO: 6000 - DNA, 3045 bp, Drosophila virilis; identical to SEQ ID NO: 3189
  CDS (1)..(3045)

SEQ ID NO: 6001 - protein, 1014 aa, Drosophila virilis; identical to SEQ ID NO: 3190

SEQ ID NO: 6002 - DNA, 3012 bp, Drosophila willistoni; identical to SEQ ID NO: 3191
  CDS (1)..(3012)

SEQ ID NO: 6003 - protein, 1003 aa, Drosophila willistoni; identical to SEQ ID NO: 3192

SEQ ID NO: 6004 - DNA, 3015 bp, Drosophila simulans; identical to SEQ ID NO: 3193
  CDS (1)..(3015)

SEQ ID NO: 6005 - protein, 1004 aa, Drosophila simulans; identical to SEQ ID NO: 3194

SEQ ID NO: 6006 - DNA, 3006 bp, Drosophila yakuba; identical to SEQ ID NO: 3195
  CDS (1)..(3006)

SEQ ID NO: 6007 - protein, 1001 aa, Drosophila yakuba; identical to SEQ ID NO: 3196

SEQ ID NO: 6008 - DNA, 2973 bp, Ciona intestinalis; identical to SEQ ID NO: 3197
  CDS (1)..(2973)

SEQ ID NO: 6009 - protein, 990 aa, Ciona intestinalis; identical to SEQ ID NO: 3198

SEQ ID NO: 6010 - DNA, 3024 bp, Drosophila pseudoobscura pseudoobscura; identical to SEQ ID NO: 3199
  CDS (1)..(3024)

SEQ ID NO: 6011 - protein, 1007 aa, Drosophila pseudoobscura pseudoobscura; identical to SEQ ID NO: 3200

SEQ ID NO: 6012 - DNA, 3261 bp, Gibberella zeae PH-1 (anamorph: Fusarium graminearum); identical to SEQ ID NO: 3201
  CDS (1)..(3261)

SEQ ID NO: 6013 - protein, 1086 aa, Gibberella zeae PH-1 (anamorph: Fusarium graminearum); identical to SEQ ID NO: 3202

SEQ ID NO: 6014 - DNA, 2988 bp, Apis mellifera (honey bee); identical to SEQ ID NO: 3203
  CDS (1)..(2988)

SEQ ID NO: 6015 - protein, 995 aa, Apis mellifera (honey bee); identical to SEQ ID NO: 3204

SEQ ID NO: 6016 - DNA, 3081 bp, Candida glabrata CBS 138; identical to SEQ ID NO: 3205
  CDS (1)..(3081)

SEQ ID NO: 6017 - protein, 1026 aa, Candida glabrata CBS 138; identical to SEQ ID NO: 3206

SEQ ID NO: 6018 - DNA, 3336 bp, Kluyveromyces lactis NRRL Y-1140; identical to SEQ ID NO: 3207
  CDS (1)..(3336)

SEQ ID NO: 6019 - protein, 1111 aa, Kluyveromyces lactis NRRL Y-1140; identical to SEQ ID NO: 3208

SEQ ID NO: 6020 - DNA, 3240 bp, Debaryomyces hansenii CBS767; identical to SEQ ID NO: 3209
  CDS (1)..(3240): transl_table=12

SEQ ID NO: 6021 - protein, 1079 aa, Debaryomyces hansenii CBS767; identical to SEQ ID NO: 3210

SEQ ID NO: 6022 - DNA, 3534 bp, Yarrowia lipolytica CLIB122; identical to SEQ ID NO: 3211
  CDS (1)..(3534)

SEQ ID NO: 6023 - protein, 1177 aa, Yarrowia lipolytica CLIB122; identical to SEQ ID NO: 3212

SEQ ID NO: 6024 - DNA, 3315 bp, Aspergillus nidulans FGSC A4; identical to SEQ ID NO: 3213
  CDS (1)..(3315)

SEQ ID NO: 6025 - protein, 1104 aa, Aspergillus nidulans FGSC A4; identical to SEQ ID NO: 3214

SEQ ID NO: 6026 - DNA, 3237 bp, Candida albicans SC5314; identical to SEQ ID NO: 3215
  CDS (1)..(3237): transl_table=12

SEQ ID NO: 6027 - protein, 1078 aa, Candida albicans SC5314; identical to SEQ ID NO: 3216

SEQ ID NO: 6028 - DNA, 3498 bp, Ustilago maydis 521; identical to SEQ ID NO: 3217
  CDS (1)..(3498)

SEQ ID NO: 6029 - protein, 1165 aa, Ustilago maydis 521; identical to SEQ ID NO: 3218

SEQ ID NO: 6030 - DNA, 3315 bp, Cryptococcus neoformans var. neoformans B-3501A; identical to SEQ ID NO: 3219
  CDS (1)..(3315)

SEQ ID NO: 6031 - protein, 1104 aa, Cryptococcus neoformans var. neoformans B-3501A; identical to SEQ ID NO: 3220

SEQ ID NO: 6032 - DNA, 2799 bp, Tribolium castaneum (red flour beetle); identical to SEQ ID NO: 3221
  CDS (1)..(2799)

SEQ ID NO: 6033 - protein, 932 aa, Tribolium castaneum (red flour beetle); identical to SEQ ID NO: 3222

SEQ ID NO: 6034 - DNA, 3297 bp, Pichia angusta; identical to SEQ ID NO: 3223
  CDS (1)..(3297)

SEQ ID NO: 6035 - protein, 1098 aa, Pichia angusta; identical to SEQ ID NO: 3224

SEQ ID NO: 6036 - DNA, 2946 bp, Oryza sativa subsp. indica; identical to SEQ ID NO: 3225
  CDS (1)..(2946)

SEQ ID NO: 6037 - protein, 981 aa, Oryza sativa subsp. indica; identical to SEQ ID NO: 3226

SEQ ID NO: 6038 - DNA, 3009 bp, Oryza sativa subsp. indica; identical to SEQ ID NO: 3227
  CDS (1)..(3009)

SEQ ID NO: 6039 - protein, 1002 aa, Oryza sativa subsp. indica; identical to SEQ ID NO: 3228

SEQ ID NO: 6040 - DNA, 3117 bp, Oryza sativa subsp. japonica; identical to SEQ ID NO: 3229
  CDS (1)..(3117)

SEQ ID NO: 6041 - protein, 1038 aa, Oryza sativa subsp. japonica; identical to SEQ ID NO: 3230

SEQ ID NO: 6042 - DNA, 2592 bp, Ostreococcus tauri; identical to SEQ ID NO: 3231
  CDS (1)..(2592)

SEQ ID NO: 6043 - protein, 863 aa, Ostreococcus tauri; identical to SEQ ID NO: 3232

SEQ ID NO: 6044 - DNA, 2931 bp, Oryza sativa subsp. indica; identical to SEQ ID NO: 3233
  CDS (1)..(2931)

SEQ ID NO: 6045 - protein, 976 aa, Oryza sativa subsp. indica; identical to SEQ ID NO: 3234

SEQ ID NO: 6046 - DNA, 3009 bp, Oryza sativa subsp. japonica; identical to SEQ ID NO: 3235
  CDS (1)..(3009)

SEQ ID NO: 6047 - protein, 1002 aa, Oryza sativa subsp. japonica; identical to SEQ ID NO: 3236

SEQ ID NO: 6048 - DNA, 2847 bp, Oryza sativa subsp. indica; identical to SEQ ID NO: 3237
  CDS (1)..(2847)

SEQ ID NO: 6049 - protein, 948 aa, Oryza sativa subsp. indica; identical to SEQ ID NO: 3238

SEQ ID NO: 6050 - DNA, 3192 bp, Paracoccidioides brasiliensis; identical to SEQ ID NO: 3239
  CDS (1)..(3192)

SEQ ID NO: 6051 - protein, 1063 aa, Paracoccidioides brasiliensis; identical to SEQ ID NO: 3240

SEQ ID NO: 6052 - DNA, 2823 bp, Arabidopsis thaliana; identical to SEQ ID NO: 3241
  CDS (1)..(2823)

SEQ ID NO: 6053 - protein, 940 aa, Arabidopsis thaliana; identical to SEQ ID NO: 3242

SEQ ID NO: 6054 - DNA, 2895 bp, Zea mays; identical to SEQ ID NO: 3243
  CDS (1)..(2895)

SEQ ID NO: 6055 - protein, 964 aa, Zea mays; identical to SEQ ID NO: 3244

SEQ ID NO: 6056 - DNA, 2775 bp, Arabidopsis thaliana; identical to SEQ ID NO: 3245
  CDS (1)..(2775)

SEQ ID NO: 6057 - protein, 924 aa, Arabidopsis thaliana; identical to SEQ ID NO: 3246

SEQ ID NO: 6058 - DNA, 2829 bp, Arabidopsis thaliana; identical to SEQ ID NO: 3247
  CDS (1)..(2829)

SEQ ID NO: 6059 - protein, 942 aa, Arabidopsis thaliana; identical to SEQ ID NO: 3248

SEQ ID NO: 6060 - DNA, 3204 bp, Schizosaccharomyces pombe; identical to SEQ ID NO: 3249
  CDS (1)..(3204)

SEQ ID NO: 6061 - protein, 1067 aa, Schizosaccharomyces pombe; identical to SEQ ID NO: 3250

SEQ ID NO: 6062 - DNA, 3018 bp, Zea mays; identical to SEQ ID NO: 3251
  CDS (1)..(3018)

SEQ ID NO: 6063 - protein, 1005 aa, Zea mays; identical to SEQ ID NO: 3252

SEQ ID NO: 6064 - DNA, 25 bp, Artificial sequence
  primer
atgctaagaacaagaaccacaaaga

SEQ ID NO: 6065 - DNA, 25 bp, Artificial sequence
  primer
ttagtccttttcctttttagcatcc

SEQ ID NO: 6066 - protein, 1160 aa, Artificial sequence; identical to SEQ ID NO: 3255
  consensus sequence
  Variant (2)..(5): Xaa in position 2 to 5 is any amino acid
  Variant (6)..(6): Xaa in position 6 is any or no amino acid
  Variant (8)..(15): Xaa in position 8 to 15 is any amino acid
  Variant (20)..(20): Xaa in position 20 is any amino acid
  Variant (22)..(44): Xaa in position 22 to 44 is any amino acid
  Variant (45)..(46): Xaa in position 45 to 46 is any or no amino acid
  Variant (49)..(49): Xaa in position 49 is any amino acid
  Variant (51)..(51): Xaa in position 51 is any amino acid
  Variant (54)..(54): Xaa in position 54 is any amino acid
  Variant (56)..(72): Xaa in position 56 to 72 is any amino acid
  Variant (73)..(102): Xaa in position 73 to 102 is any or no amino acid
  Variant (104)..(105): Xaa in position 104 to 105 is any amino acid
  Variant (109)..(120): Xaa in position 109 to 120 is any amino acid
  Variant (121)..(145): Xaa in position 121 to 145 is any or no amino acid
  Variant (149)..(150): Xaa in position 149 to 150 is any amino acid
  Variant (152)..(161): Xaa in position 152 to 161 is any amino acid
  Variant (162)..(268): Xaa in position 162 to 268 is any or no amino acid
  Variant (270)..(270): Xaa in position 270 is any amino acid
  Variant (272)..(275): Xaa in position 272 to 275 is any amino acid
  Variant (276)..(288): Xaa in position 276 to 288 is any or no amino acid
  Variant (290)..(292): Xaa in position 290 to 292 is any amino acid
  Variant (294)..(301): Xaa in position 294 to 301 is any amino acid
  Variant (302)..(337): Xaa in position 302 to 337 is any or no amino acid
  Variant (339)..(339): Xaa in position 339 is any amino acid
  Variant (341)..(342): Xaa in position 341 to 342 is any amino acid
  Variant (344)..(353): Xaa in position 344 to 353 is any amino acid
  Variant (355)..(356): Xaa in position 355 to 356 is any amino acid
  Variant (359)..(361): Xaa in position 359 to 361 is any amino acid
  Variant (362)..(364): Xaa in position 362 to 364 is any or no amino acid
  Variant (367)..(369): Xaa in position 367 to 369 is any amino acid
  Variant (371)..(371): Xaa in position 371 is any amino acid
  Variant (373)..(373): Xaa in position 373 is any amino acid
  Variant (377)..(381): Xaa in position 377 to 381 is any amino acid
  Variant (384)..(384): Xaa in position 384 is any amino acid
  Variant (385)..(385): Xaa in position 385 is any or no amino acid
  Variant (387)..(390): Xaa in position 387 to 390 is any amino acid
  Variant (391)..(397): Xaa in position 391 to 397 is any or no amino acid
  Variant (399)..(399): Xaa in position 399 is any amino acid
  Variant (401)..(405): Xaa in position 401 to 405 is any amino acid
  Variant (407)..(407): Xaa in position 407 is any amino acid
  Variant (409)..(409): Xaa in position 409 is any amino acid
  Variant (411)..(411): Xaa in position 411 is any amino acid
  Variant (416)..(416): Xaa in position 416 is any amino acid
  Variant (423)..(423): Xaa in position 423 is any amino acid
  Variant (425)..(425): Xaa in position 425 is any amino acid
  Variant (427)..(427): Xaa in position 427 is any amino acid
  Variant (429)..(433): Xaa in position 429 to 433 is any amino acid
  Variant (435)..(444): Xaa in position 435 to 444 is any amino acid
  Variant (445)..(446): Xaa in position 445 to 446 is any or no amino acid
  Variant (448)..(452): Xaa in position 448 to 452 is any amino acid
  Variant (454)..(455): Xaa in position 454 to 455 is any amino acid
  Variant (459)..(459): Xaa in position 459 is any amino acid
  Variant (462)..(463): Xaa in position 462 to 463 is any amino acid
  Variant (466)..(466): Xaa in position 466 is any amino acid
  Variant (467)..(468): Xaa in position 467 to 468 is any or no amino acid
  Variant (472)..(472): Xaa in position 472 is any amino acid
  Variant (483)..(484): Xaa in position 483 to 484 is any amino acid
  Variant (488)..(489): Xaa in position 488 to 489 is any amino acid
  Variant (490)..(501): Xaa in position 490 to 501 is any or no amino acid
  Variant (503)..(503): Xaa in position 503 is any amino acid
  Variant (506)..(510): Xaa in position 506 to 510 is any amino acid
  Variant (512)..(514): Xaa in position 512 to 514 is any amino acid
  Variant (516)..(517): Xaa in position 516 to 517 is any amino acid
  Variant (522)..(523): Xaa in position 522 to 523 is any amino acid
  Variant (525)..(525): Xaa in position 525 is any amino acid
  Variant (527)..(527): Xaa in position 527 is any amino acid
  Variant (536)..(537): Xaa in position 536 to 537 is any amino acid
  Variant (539)..(539): Xaa in position 539 is any amino acid
  Variant (541)..(543): Xaa in position 541 to 543 is any amino acid
  Variant (547)..(547): Xaa in position 547 is any amino acid
  Variant (549)..(550): Xaa in position 549 to 550 is any amino acid
  Variant (561)..(562): Xaa in position 561 to 562 is any amino acid
  Variant (571)..(573): Xaa in position 571 to 573 is any amino acid
  Variant (580)..(581): Xaa in position 580 to 581 is any amino acid
  Variant (597)..(597): Xaa in position 597 is any amino acid
  Variant (600)..(602): Xaa in position 600 to 602 is any amino acid
  Variant (604)..(604): Xaa in position 604 is any amino acid
  Variant (607)..(609): Xaa in position 607 to 609 is any amino acid
  Variant (611)..(611): Xaa in position 611 is any amino acid
  Variant (615)..(615): Xaa in position 615 is any amino acid
  Variant (620)..(620): Xaa in position 620 is any amino acid
  Variant (623)..(623): Xaa in position 623 is any amino acid
  Variant (625)..(625): Xaa in position 625 is any amino acid
  Variant (626)..(628): Xaa in position 626 to 628 is any or no amino acid
  Variant (630)..(631): Xaa in position 630 to 631 is any amino acid
  Variant (635)..(635): Xaa in position 635 is any amino acid
  Variant (641)..(641): Xaa in position 641 is any amino acid
  Variant (648)..(649): Xaa in position 648 to 649 is any amino acid
  Variant (658)..(659): Xaa in position 658 to 659 is any amino acid
  Variant (663)..(663): Xaa in position 663 is any amino acid
  Variant (667)..(667): Xaa in position 667 is any amino acid
  Variant (672)..(675): Xaa in position 672 to 675 is any amino acid
  Variant (678)..(678): Xaa in position 678 is any amino acid
  Variant (681)..(681): Xaa in position 681 is any amino acid
  Variant (686)..(686): Xaa in position 686 is any amino acid
  Variant (688)..(690): Xaa in position 688 to 690 is any amino acid
  Variant (693)..(695): Xaa in position 693 to 695 is any amino acid
  Variant (698)..(699): Xaa in position 698 to 699 is any amino acid
  Variant (702)..(703): Xaa in position 702 to 703 is any amino acid
  Variant (706)..(713): Xaa in position 706 to 713 is any amino acid
  Variant (715)..(722): Xaa in position 715 to 722 is any amino acid
  Variant (723)..(751): Xaa in position 723 to 751 is any or no amino acid
  Variant (753)..(755): Xaa in position 753 to 755 is any amino acid
  Variant (758)..(759): Xaa in position 758 to 759 is any amino acid
  Variant (764)..(764): Xaa in position 764 is any amino acid
  Variant (770)..(770): Xaa in position 770 is any amino acid
  Variant (772)..(772): Xaa in position 772 is any amino acid
  Variant (776)..(777): Xaa in position 776 to 777 is any amino acid
  Variant (780)..(780): Xaa in position 780 is any amino acid
  Variant (782)..(784): Xaa in position 782 to 784 is any amino acid
  Variant (786)..(797): Xaa in position 786 to 797 is any amino acid
  Variant (798)..(940): Xaa in position 798 to 940 is any or no amino acid
  Variant (943)..(946): Xaa in position 943 to 946 is any amino acid
  Variant (948)..(950): Xaa in position 948 to 950 is any amino acid
  Variant (952)..(954): Xaa in position 952 to 954 is any amino acid
  Variant (956)..(956): Xaa in position 956 is any amino acid
  Variant (958)..(959): Xaa in position 958 to 959 is any amino acid
  Variant (962)..(962): Xaa in position 962 is any amino acid
  Variant (963)..(963): Xaa in position 963 is any or no amino acid
  Variant (973)..(973): Xaa in position 973 is any amino acid
  Variant (976)..(976): Xaa in position 976 is any amino acid
  Variant (978)..(979): Xaa in position 978 to 979 is any amino acid
  Variant (984)..(992): Xaa in position 984 to 992 is any amino acid
  Variant (993)..(1007): Xaa in position 993 to 1007 is any or no amino acid
  Variant (1009)..(1010): Xaa in position 1009 to 1010 is any amino acid
  Variant (1013)..(1013): Xaa in position 1013 is any amino acid
  Variant (1022)..(1023): Xaa in position 1022 to 1023 is any amino acid
  Variant (1026)..(1037): Xaa in position 1026 to 1037 is any amino acid
  Variant (1038)..(1041): Xaa in position 1038 to 1041 is any or no amino acid
  Variant (1043)..(1043): Xaa in position 1043 is any amino acid
  Variant (1045)..(1045): Xaa in position 1045 is any amino acid
  Variant (1047)..(1052): Xaa in position 1047 to 1052 is any amino acid
  Variant (1056)..(1056): Xaa in position 1056 is any amino acid
  Variant (1058)..(1058): Xaa in position 1058 is any amino acid
  Variant (1060)..(1061): Xaa in position 1060 to 1061 is any amino acid
  Variant (1070)..(1070): Xaa in position 1070 is any amino acid
  Variant (1072)..(1073): Xaa in position 1072 to 1073 is any amino acid
  Variant (1075)..(1077): Xaa in position 1075 to 1077 is any amino acid
  Variant (1081)..(1089): Xaa in position 1081 to 1089 is any amino acid
  Variant (1095)..(1096): Xaa in position 1095 to 1096 is any amino acid
  Variant (1098)..(1098): Xaa in position 1098 is any amino acid
  Variant (1100)..(1101): Xaa in position 1100 to 1101 is any amino acid
  Variant (1103)..(1104): Xaa in position 1103 to 1104 is any amino acid
  Variant (1107)..(1108): Xaa in position 1107 to 1108 is any amino acid
  Variant (1111)..(1112): Xaa in position 1111 to 1112 is any amino acid
  Variant (1115)..(1115): Xaa in position 1115 is any amino acid
  Variant (1117)..(1122): Xaa in position 1117 to 1122 is any amino acid
  Variant (1124)..(1124): Xaa in position 1124 is any amino acid
  Variant (1126)..(1127): Xaa in position 1126 to 1127 is any amino acid
  Variant (1129)..(1130): Xaa in position 1129 to 1130 is any amino acid
  Variant (1132)..(1133): Xaa in position 1132 to 1133 is any amino acid
  Variant (1135)..(1135): Xaa in position 1135 is any amino acid
  Variant (1137)..(1141): Xaa in position 1137 to 1141 is any amino acid
  Variant (1142)..(1142): Xaa in position 1142 is any or no amino acid
  Variant (1145)..(1151): Xaa in position 1145 to 1151 is any amino acid
  Variant (1153)..(1159): Xaa in position 1153 to 1159 is any amino acid

SEQ ID NO: 6067 - protein, 41 aa, Artificial sequence; identical to SEQ ID NO: 3256
  protein pattern
  Variant (2)..(2): Xaa in position 2 is Leu or Val
  Variant (3)..(3): Xaa in position 3 is Asp, Glu, Gly, Asn or Ser
  Variant (5)..(5): Xaa in position 5 is any amino acid
  Variant (6)..(6): Xaa in position 6 is any or no amino acid
  Variant (8)..(8): Xaa in position 8 is any or no amino acid
  Variant (15)..(15): Xaa in position 15 is Leu or Met
  Variant (16)..(16): Xaa in position 16 is any amino acid
  Variant (18)..(18): Xaa in position 18 is Ile or Val
  Variant (29)..(29): Xaa in position 29 is Ile or Val
  Variant (32)..(32): Xaa in position 32 is Ile, Leu or Met
  Variant (35)..(35): Xaa in position 35 is Lys or Arg
  Variant (36)..(36): Xaa in position 36 is any amino acid
  Variant (37)..(37): Xaa in position 37 is Ile or Val
  Variant (39)..(39): Xaa in position 39 is Ala or Cys

SEQ ID NO: 6068 - protein, 58 aa, Artificial sequence; identical to SEQ ID NO: 3257
  protein pattern
  Variant (2)..(3): Xaa in position 2 to 3 is any amino acid
  Variant (7)..(7): Xaa in position 7 is Ala or Ser
  Variant (8)..(8): Xaa in position 8 is Ala, Asn or Ser
  Variant (13)..(13): Xaa in position 13 is any or no amino acid
  Variant (15)..(15): Xaa in position 15 is any or no amino acid
  Variant (21)..(21): Xaa in position 21 is any amino acid
  Variant (22)..(22): Xaa in position 22 is Asn or Ser
  Variant (26)..(26): Xaa in position 26 is any amino acid
  Variant (28)..(28): Xaa in position 28 is Leu or Met
  Variant (30)..(30): Xaa in position 30 is Ile or Val
  Variant (31)..(31): Xaa in position 31 is Ala, Pro, Ser or Thr
  Variant (32)..(32): Xaa in position 32 is Ile or Val
  Variant (36)..(36): Xaa in position 36 is Lys or Arg
  Variant (40)..(40): Xaa in position 40 is Ile or Val
  Variant (44)..(44): Xaa in position 44 is Asp or Asn
  Variant (45)..(46): Xaa in position 45 to 46 is any amino acid
  Variant (47)..(47): Xaa in position 47 is Asp, Glu or Asn
  Variant (48)..(48): Xaa in position 48 is any amino acid
  Variant (51)..(51): Xaa in position 51 is any amino acid
  Variant (54)..(54): Xaa in position 54 is any amino acid

SEQ ID NO: 6069 - protein, 41 aa, Artificial sequence; identical to SEQ ID NO: 3258
  protein pattern
  Variant (2)..(3): Xaa in position 2 to 3 is any or no amino acid
  Variant (6)..(6): Xaa in position 6 is Leu or Met
  Variant (7)..(7): Xaa in position 7 is any amino acid
  Variant (9)..(9): Xaa in position 9 is Ile or Val
  Variant (11)..(11): Xaa in position 11 is Asp, Glu, Lys or Arg
  Variant (18)..(18): Xaa in position 18 is Ala or Ser
  Variant (20)..(20): Xaa in position 20 is Gly or Ser
  Variant (21)..(21): Xaa in position 21 is any amino acid
  Variant (22)..(22): Xaa in position 22 is Ile or Leu
  Variant (23)..(23): Xaa in position 23 is any amino acid
  Variant (25)..(25): Xaa in position 25 is any amino acid
  Variant (26)..(26): Xaa in position 26 is Ser, Thr or Val
  Variant (27)..(27): Xaa in position 27 is Asp, Glu or Gln
  Variant (31)..(31): Xaa in position 31 is Ile or Leu
  Variant (32)..(32): Xaa in position 32 is Cys or Thr
  Variant (33)..(33): Xaa in position 33 is Phe, Leu or Met
  Variant (34)..(34): Xaa in position 34 is any amino acid
  Variant (37)..(37): Xaa in position 37 is Pro or Thr
  Variant (39)..(39): Xaa in position 39 is Thr or Val

SEQ ID NO: 6070 - protein, 54 aa, Artificial sequence; identical to SEQ ID NO: 3259
  protein pattern
  Variant (2)..(3): Xaa in position 2 to 3 is any amino acid
  Variant (12)..(12): Xaa in position 12 is any amino acid
  Variant (14)..(14): Xaa in position 14 is Ile or Met
  Variant (15)..(16): Xaa in position 15 to 16 is any amino acid
  Variant (17)..(17): Xaa in position 17 is Ala or Ser
  Variant (18)..(18): Xaa in position 18 is Phe, Leu or Met
  Variant (19)..(19): Xaa in position 19 is Ile, Leu or Val
  Variant (23)..(26): Xaa in position 23 to 26 is any amino acid
  Variant (27)..(27): Xaa in position 27 is Ile, Leu or Val
  Variant (28)..(28): Xaa in position 28 is Asp, Lys or Arg
  Variant (29)..(29): Xaa in position 29 is any amino acid
  Variant (30)..(30): Xaa in position 30 is Asp, Asn or Thr
  Variant (31)..(31): Xaa in position 31 is Ile, Leu, Met or Val
  Variant (37)..(37): Xaa in position 37 is Ile, Leu or Val
  Variant (38)..(38): Xaa in position 38 is Ser or Thr
  Variant (39)..(39): Xaa in position 39 is Leu or Val
  Variant (40)..(40): Xaa in position 40 is any amino acid
  Variant (42)..(42): Xaa in position 42 is Lys or Arg
  Variant (43)..(43): Xaa in position 43 is Ile or Val
  Variant (44)..(44): Xaa in position 44 is Leu or Met
  Variant (45)..(45): Xaa in position 45 is any amino acid
  Variant (46)..(46): Xaa in position 46 is Ile or Val
  Variant (49)..(49): Xaa in position 49 is Ile, Leu or Val
  Variant (50)..(50): Xaa in position 50 is Lys or Arg
  Variant (53)..(53): Xaa in position 53 is Ala, Thr or Val
  Variant (54)..(54): Xaa in position 54 is Ile, Leu or Val

SEQ ID NO: 6071 - protein, 28 aa, Artificial sequence
  protein pattern
  Variant (2)..(4): Xaa in position 2 to 4 is any amino acid
  Variant (5)..(6): Xaa in position 5 to 6 is any or no amino acid
  Variant (11)..(11): Xaa in position 11 is Ala or Ser
  Variant (17)..(17): Xaa in position 17 is any amino acid
  Variant (19)..(19): Xaa in position 19 is any amino acid
  Variant (21)..(21): Xaa in position 21 is Asp or Glu
  Variant (22)..(22): Xaa in position 22 is Lys or Arg
  Variant (23)..(23): Xaa in position 23 is Ile or Val
  Variant (24)..(24): Xaa in position 24 is any amino acid
  Variant (27)..(27): Xaa in position 27 is any amino acid
  Variant (28)..(28): Xaa in position 28 is Ala, Thr or Val
LXXXXXYCREXGVRNLXKXIXXXXRKXX

SEQ ID NO: 6072 - protein, 15 aa, Artificial sequence
  protein pattern
  Variant (2)..(2): Xaa in position 2 is Ala, Pro or Val
  Variant (5)..(5): Xaa in position 5 is any amino acid
  Variant (11)..(11): Xaa in position 11 is Asn or Thr
  Variant (12)..(12): Xaa in position 12 is Ala, Asn, Gln or Ser
PXGVXMGLAWXXMGG

SEQ ID NO: 6073 - protein, 38 aa, Artificial sequence; identical to SEQ ID NO: 3262
  protein pattern
  Variant (2)..(2): Xaa in position 2 is Ala, Gly or Ser
  Variant (3)..(3): Xaa in position 3 is Lys or Arg
  Variant (4)..(4): Xaa in position 4 is any amino acid
  Variant (5)..(5): Xaa in position 5 is Ile or Val
  Variant (6)..(6): Xaa in position 6 is Asp or Glu
  Variant (7)..(7): Xaa in position 7 is Ala, Asp, Glu, Asn, Ser or Thr
  Variant (9)..(10): Xaa in position 9 to 10 is any amino acid
  Variant (11)..(12): Xaa in position 11 to 12 is any or no amino acid
  Variant (14)..(15): Xaa in position 14 to 15 is any or no amino acid
  Variant (17)..(17): Xaa in position 17 is Glu, Lys or Arg
  Variant (18)..(18): Xaa in position 18 is Phe or Tyr
  Variant (19)..(19): Xaa in position 19 is any amino acid
  Variant (21)..(21): Xaa in position 21 is any amino acid
  Variant (24)..(24): Xaa in position 24 is Leu or Met
  Variant (26)..(26): Xaa in position 26 is Ala, Gly, Ser or Val
  Variant (28)..(29): Xaa in position 28 to 29 is Lys or Arg
  Variant (33)..(33): Xaa in position 33 is Ile, Leu, Met or Val
  Variant (34)..(34): Xaa in position 34 is Asp or Glu
  Variant (35)..(35): Xaa in position 35 is any amino acid
  Variant (36)..(36): Xaa in position 36 is Asp, Glu or Gly
  Variant (37)..(37): Xaa in position 37 is any amino acid
  Variant (38)..(38): Xaa in position 38 is Asp or Lys

SEQ ID NO: 6074 - protein, 23 aa, Artificial sequence
  protein pattern
  Variant (3)..(3): Xaa in position 3 is any amino acid
  Variant (12)..(13): Xaa in position 12 to 13 is any amino acid
  Variant (14)..(14): Xaa in position 14 is Ile or Leu
  Variant (15)..(15): Xaa in position 15 is Ala or Ser
  Variant (16)..(16): Xaa in position 16 is any amino acid
  Variant (17)..(17): Xaa in position 17 is Ser or Thr
  Variant (18)..(18): Xaa in position 18 is Phe, Ile, Leu or Val
  Variant (19)..(19): Xaa in position 19 is Ala, Cys, Gly, Ser or Thr
  Variant (20)..(20): Xaa in position 20 is Lys or Arg
  Variant (21)..(22): Xaa in position 21 to 22 is any amino acid
  Variant (23)..(23): Xaa in position 23 is Ile, Leu or Met
TGXLGDVMKESXXXXXXXXXXXX

SEQ ID NO: 6075 - protein, 29 aa, Artificial sequence
  protein pattern
  Variant (2)..(4): Xaa in position 2 to 4 is any amino acid
  Variant (7)..(7): Xaa in position 7 is Ile or Val
  Variant (8)..(8): Xaa in position 8 is Ala or Thr
  Variant (9)..(9): Xaa in position 9 is Ala, Asp or Glu
  Variant (10)..(10): Xaa in position 10 is Asp or Glu
  Variant (12)..(13): Xaa in position 12 to 13 is any amino acid
  Variant (16)..(17): Xaa in position 16 to 17 is any amino acid
  Variant (20)..(22): Xaa in position 20 to 22 is any amino acid
  Variant (23)..(23): Xaa in position 23 is Ala, Gly, Ser or Thr
  Variant (24)..(26): Xaa in position 24 to 26 is any amino acid
  Variant (27)..(27): Xaa in position 27 is Ala, Cys, Ser or Thr
  Variant (29)..(29): Xaa in position 29 is Ile, Leu or Val
IXXXGYXXXXKXXIAXXYLXXXXXXXXGX

SEQ ID NO: 6076 - protein, 27 aa, Artificial sequence
  protein pattern
  Variant (2)..(2): Xaa in position 2 is Ala, Ser or Val
  Variant (3)..(3): Xaa in position 3 is Ala, Gly or Gln
  Variant (4)..(4): Xaa in position 4 is Ala, Ile or Val
  Variant (5)..(6): Xaa in position 5 to 6 is any amino acid
  Variant (7)..(7): Xaa in position 7 is Ile, Leu or Val
  Variant (8)..(8): Xaa in position 8 is Ile or Val
  Variant (9)..(9): Xaa in position 9 is Phe or Leu
  Variant (11)..(11): Xaa in position 11 is any amino acid
  Variant (12)..(12): Xaa in position 12 is Ala, Asp, Glu or Gly
  Variant (14)..(15): Xaa in position 14 to 15 is any amino acid
  Variant (17)..(17): Xaa in position 17 is Phe, Trp or Tyr
  Variant (18)..(18): Xaa in position 18 is any amino acid
  Variant (19)..(19): Xaa in position 19 is Asp or Glu
  Variant (21)..(23): Xaa in position 21 to 23 is any amino acid
  Variant (24)..(24): Xaa in position 24 is Ile, Met or Val
  Variant (25)..(26): Xaa in position 25 to 26 is any amino acid
RXXXXXXXXPXXNXXDXXXLXXXXXXG

SEQ ID NO: 6077 - protein, 15 aa, Artificial sequence
  protein pattern
  Variant (2)..(2): Xaa in position 2 is Ala, Glu, Gln or Ser
  Variant (6)..(6): Xaa in position 6 is Ile, Met or Val
  Variant (11)..(11): Xaa in position 11 is Ile or Val
  Variant (14)..(14): Xaa in position 14 is Ile, Leu or Val
  Variant (15)..(15): Xaa in position 15 is Asp, Gly or Ser
TXNPLXLIDEXDKXX

SEQ ID NO: 6078 - protein, 25 aa, Artificial sequence
  protein pattern
  Variant (2)..(8): Xaa in position 2 to 8 is any amino acid
  Variant (11)..(12): Xaa in position 11 to 12 is any amino acid
  Variant (13)..(13): Xaa in position 13 is Ala, Ser or Thr
  Variant (15)..(15): Xaa in position 15 is any amino acid
  Variant (16)..(16): Xaa in position 16 is any or no amino acid
  Variant (18)..(18): Xaa in position 18 is any amino acid
  Variant (20)..(20): Xaa in position 20 is Glu, Lys or Arg
  Variant (21)..(22): Xaa in position 21 to 22 is any amino acid
  Variant (23)..(23): Xaa in position 23 is Glu or Asn
  Variant (24)..(24): Xaa in position 24 is Ala, Ile or Leu
  Variant (25)..(25): Xaa in position 25 is Glu, Gly, Asn, Gln, Ser or Thr
LXXXXXXXRLXXXLXXLXKXXXXXX

SEQ ID NO: 6079 - DNA, 1815 bp, Saccharomyces cerevisiae
  CDS (1)..(1815)
atgtcagatcctatagtaacgtcttccaaaatggaaaaaagtgcagagtttgaagtaacagactctgctttatataataacttcaatacattaacaacagcttcactaactccggagattaaggaacattctgaggaatctcgcaatgggttagttcacagattcgtcgactcattcagaagagccgaaagccaacgtttagaagaagacaatgacttggaggatggtaccaaatcgatgaaatctaataaccacttaaaaaagtcaatgaaatctagacatgttgtaatgatgtctttaggtacagggataggaacaggtcttctagttgccaacgccaaaggtttgagtcttgcaggcccggggtctttagtcatcggttacgttatggtgtccttcgtcacgtattttatggtccaagcggctggtgagatgggtgtcacttatccgacgcttccaggtaacttcaatgcatacaattcaatctttatttcaaagtcgtttgggttcgcgaccacttggttattttgcattcagtggttaactgtgctaccgttggaattgattacttcttccatgaccgtcaagtactggaatgacacaattaatgctgatgtattcattgtcattttctatgtgtttttattgtttatccacttttttggtgttaaggcatacggtgaaacggaatttatcttcaattcctgtaagatattgatggttgcaggattcattattttatcagtcgtcatcaattgtgggggagccggtgtggacggctatattggcggcaaatattggcgcgaccctggttcatttgcagaaggcagcggtgccactcgtttcaaagggatatgttatattctagtatctgcatatttctccttcggtggtattgaattatttgttctttccatcaatgagcagtctaaccctagaaaatccactcctgtagccgcgaagagaagtgtatatcgtattttgatcatttatttgctgacaatgattctaattgggttcaatgttcctcacaataacgatcaattgatgggttccggtggctccgcaacgcacgcttcaccatatgtcttggcagcctctattcacaaggttagggtcatcccccatatcattaatgctgttattttgatatcagtcatctctgttgcgaactctgccctttatgccgcaccgagattaatgtgttccttggctcaacagggctatgctccaaaatttttgaactatattgatagggagggaagacctttaagggccttggtagtgtgctctcttgttggtgtcgttggcttcgtcgcctgttctccacaggaagagcaagcatttacatggttggcagccattgcaggtttgagtgaacttttcacatggtcaggcattatgctttcacacattcgattcagaaaagcgatgaaagtccaaggaagatcacttgatgaagtcggctataaggccaataccggtatatggggttcatactatggggtttttttcaatatgcttgtctttatggcccaattttgggtcgcactgtctccaataggaaatggcggaaagtgtgatgctcaggcattcttcgagagttatctggctgccccgctatggatattcatgtatgttggatacatggtttacaaaagagattttacctttttaaacccactggacaagatcgacttggactttcatagaagagtttacgaccctgaaataatgaggcaggaggacgaagaaaataaagaaaggttaaagaactcttcaatattcgtcagagtctacaaattttggtgttag

SEQ ID NO: 6080 - protein, 604 aa, Saccharomyces cerevisiae
MSDPIVTSSKMEKSAEFEVTDSALYNNFNTLTTASLTPEIKEHSEESRNGLVHRFVDSFRRAESQRLEEDNDLEDGTKSMKSNNHLKKSMKSRHVVMMSLGTGIGTGLLVANAKGLSLAGPGSLVIGYVMVSFVTYFMVQAAGEMGVTYPTLPGNFNAYNSIFISKSFGFATTWLFCIQWLTVLPLELITSSMTVKYWNDTINADVFIVIFYVFLLFIHFFGVKAYGETEFIFNSCKILMVAGFIILSVVINCGGAGVDGYIGGKYWRDPGSFAEGSGATRFKGICYILVSAYFSFGGIELFVLSINEQSNPRKSTPVAAKRSVYRILIIYLLTMILIGFNVPHNNDQLMGSGGSATHASPYVLAASIHKVRVIPHIINAVILISVISVANSALYAAPRLMCSLAQQGYAPKFLNYIDREGRPLRALVVCSLVGVVGFVACSPQEEQAFTWLAAIAGLSELFTWSGIMLSHIRFRKAMKVQGRSLDEVGYKANTGIWGSYYGVFFNMLVFMAQFWVALSPIGNGGKCDAQAFFESYLAAPLWIFMYVGYMVYKRDFTFLNPLDKIDLDFHRRVYDPEIMRQEDEENKERLKNSSIFVRVYKFWC

SEQ ID NO: 6081 - DNA, 1815 bp, Saccharomyces pastorianus; identical to SEQ ID NO: 3884
  CDS (1)..(1815)

SEQ ID NO: 6082 - protein, 604 aa, Saccharomyces pastorianus; identical to SEQ ID NO: 3885

SEQ ID NO: 6083 - DNA, 1476 bp, Clostridium acetobutylicum ATCC 824; identical to SEQ ID NO: 3886
  CDS (1)..(1476): transl_table=11

SEQ ID NO: 6084 - protein, 491 aa, Clostridium acetobutylicum ATCC 824; identical to SEQ ID NO: 3887

SEQ ID NO: 6085 - DNA, 1461 bp, Listeria monocytogenes EGD-e; identical to SEQ ID NO: 3888
  CDS (1)..(1461): transl_table=11

SEQ ID NO: 6086 - protein, 486 aa, Listeria monocytogenes EGD-e; identical to SEQ ID NO: 3889

SEQ ID NO: 6087 - DNA, 1452 bp, Lactobacillus plantarum WCFS1; identical to SEQ ID NO: 3890
  CDS (1)..(1452): transl_table=11

SEQ ID NO: 6088 - protein, 483 aa, Lactobacillus plantarum WCFS1; identical to SEQ ID NO: 3891

SEQ ID NO: 6089 - DNA, 1872 bp, Candida glabrata CBS 138; identical to SEQ ID NO: 3892
  CDS (1)..(1872)

SEQ ID NO: 6090 - protein, 623 aa, Candida glabrata CBS 138; identical to SEQ ID NO: 3893

SEQ ID NO: 6091 - DNA, 1839 bp, Candida glabrata CBS 138; identical to SEQ ID NO: 3894
  CDS (1)..(1839)

SEQ ID NO: 6092 - protein, 612 aa, Candida glabrata CBS 138; identical to SEQ ID NO: 3895

SEQ ID NO: 6093 - DNA, 1983 bp, Candida glabrata CBS 138; identical to SEQ ID NO: 3896
  CDS (1)..(1983)

SEQ ID NO: 6094 - protein, 660 aa, Candida glabrata CBS 138; identical to SEQ ID NO: 3897

SEQ ID NO: 6095 - DNA, 1905 bp, Candida glabrata CBS 138; identical to SEQ ID NO: 3898
  CDS (1)..(1905)

SEQ ID NO: 6096 - protein, 634 aa, Candida glabrata CBS 138; identical to SEQ ID NO: 3899

SEQ ID NO: 6097 - DNA, 1902 bp, Zygosaccharomyces rouxii; identical to SEQ ID NO: 3900
  CDS (1)..(1902)

SEQ ID NO: 6098 - protein, 633 aa, Zygosaccharomyces rouxii; identical to SEQ ID NO: 3901

SEQ ID NO: 6099 - DNA, 1830 bp, Saccharomyces uvarum; identical to SEQ ID NO: 3902
  CDS (1)..(1830)

SEQ ID NO: 6100 - protein, 609 aa, Saccharomyces uvarum; identical to SEQ ID NO: 3903

SEQ ID NO: 6101 - DNA, 1746 bp, Penicillium chrysogenum; identical to SEQ ID NO: 3904
  CDS (1)..(1746)

SEQ ID NO: 6102 - protein, 581 aa, Penicillium chrysogenum; identical to SEQ ID NO: 3905

SEQ ID NO: 6103 - DNA, 1830 bp, Saccharomyces pastorianus; identical to SEQ ID NO: 3906
  CDS (1)..(1830)

SEQ ID NO: 6104 - protein, 609 aa, Saccharomyces pastorianus; identical to SEQ ID NO: 3907

SEQ ID NO: 6105 - DNA, 1806 bp, Saccharomyces kluyveri; identical to SEQ ID NO: 3908
  CDS (1)..(1806)

SEQ ID NO: 6106 - protein, 601 aa, Saccharomyces kluyveri; identical to SEQ ID NO: 3909

SEQ ID NO: 6107 - DNA, 1752 bp, Saccharomyces kluyveri; identical to SEQ ID NO: 3910
  CDS (1)..(1752)

SEQ ID NO: 6108 - protein, 583 aa, Saccharomyces kluyveri; identical to SEQ ID NO: 3911

SEQ ID NO: 6109 - DNA, 1788 bp, Saccharomyces castellii; identical to SEQ ID NO: 3912
  CDS (1)..(1788)

SEQ ID NO: 6110 - protein, 595 aa, Saccharomyces castellii; identical to SEQ ID NO: 3913

SEQ ID NO: 6111 - DNA, 1782 bp, Saccharomyces castellii; identical to SEQ ID NO: 3914
  CDS (1)..(1782)

SEQ ID NO: 6112 - protein, 593 aa, Saccharomyces castellii; identical to SEQ ID NO: 3915

SEQ ID NO: 6113 - DNA, 1857 bp, Saccharomyces bayanus; identical to SEQ ID NO: 3916
  CDS (1)..(1857)

SEQ ID NO: 6114 - protein, 618 aa, Saccharomyces bayanus; identical to SEQ ID NO: 3917

SEQ ID NO: 6115 - DNA, 1830 bp, Saccharomyces bayanus; identical to SEQ ID NO: 3918
  CDS (1)..(1830)

SEQ ID NO: 6116 - protein, 609 aa, Saccharomyces bayanus; identical to SEQ ID NO: 3919

SEQ ID NO: 6117 - DNA, 1902 bp, Saccharomyces bayanus; identical to SEQ ID NO: 3920
  CDS (1)..(1902)

SEQ ID NO: 6118 - protein, 633 aa, Saccharomyces bayanus; identical to SEQ ID NO: 3921

SEQ ID NO: 6119 - DNA, 1902 bp, Saccharomyces cerevisiae; identical to SEQ ID NO: 3922
  CDS (1)..(1902)

SEQ ID NO: 6120 - protein, 633 aa, Saccharomyces cerevisiae; identical to SEQ ID NO: 3923

SEQ ID NO: 6121 - DNA, 1830 bp, Saccharomyces cerevisiae; identical to SEQ ID NO: 3924
  CDS (1)..(1830)

SEQ ID NO: 6122 - protein, 609 aa, Saccharomyces cerevisiae; identical to SEQ ID NO: 3925

SEQ ID NO: 6123 - DNA, 1779 bp, Saccharomyces cerevisiae; identical to SEQ ID NO: 3926
  CDS (1)..(1779)

SEQ ID NO: 6124 - protein, 592 aa, Saccharomyces cerevisiae; identical to SEQ ID NO: 3927

SEQ ID NO: 6125 - DNA, 1860 bp, Saccharomyces cerevisiae; identical to SEQ ID NO: 3928
  CDS (1)..(1860)

SEQ ID NO: 6126 - protein, 619 aa, Saccharomyces cerevisiae; identical to SEQ ID NO: 3929

SEQ ID NO: 6127 - DNA, 1746 bp, Schizosaccharomyces pombe; identical to SEQ ID NO: 3930
  CDS (1)..(1746)

SEQ ID NO: 6128 - protein, 581 aa, Schizosaccharomyces pombe; identical to SEQ ID NO: 3931

SEQ ID NO: 6129 - DNA, 1758 bp, Schizosaccharomyces pombe; identical to SEQ ID NO: 3932
  CDS (1)..(1758)

SEQ ID NO: 6130 - protein, 585 aa, Schizosaccharomyces pombe; identical to SEQ ID NO: 3933

SEQ ID NO: 6131 - DNA, 1743 bp, Schizosaccharomyces pombe; identical to SEQ ID NO: 3934
  CDS (1)..(1743)

SEQ ID NO: 6132 - protein, 580 aa, Schizosaccharomyces pombe; identical to SEQ ID NO: 3935

SEQ ID NO: 6133 - DNA, 1752 bp, Schizosaccharomyces pombe; identical to SEQ ID NO: 3936
  CDS (1)..(1752)

SEQ ID NO: 6134 - protein, 583 aa, Schizosaccharomyces pombe; identical to SEQ ID NO: 3937

SEQ ID NO: 6135 - DNA, 25 bp, Artificial sequence
  primer
atgtcagatcctatagtaacgtctt

SEQ ID NO: 6136 - DNA, 25 bp, Artificial sequence
  primer
ctaacaccaaaatttgtagactctg

SEQ ID NO: 6137 - protein, 608 aa, Artificial sequence; identical to SEQ ID NO: 3940
  consensus sequence
  Variant (2)..(4): Xaa in position 2 to 4 is any amino acid
  Variant (6)..(13): Xaa in position 6 to 13 is any amino acid
  Variant (14)..(57): Xaa in position 14 to 57 is any or no amino acid
  Variant (60)..(64): Xaa in position 60 to 64 is any amino acid
  Variant (67)..(68): Xaa in position 67 to 68 is any amino acid
  Variant (70)..(72): Xaa in position 70 to 72 is any amino acid
  Variant (74)..(75): Xaa in position 74 to 75 is any amino acid
  Variant (81)..(81): Xaa in position 81 is any amino acid
  Variant (83)..(87): Xaa in position 83 to 87 is any amino acid
  Variant (89)..(91): Xaa in position 89 to 91 is any amino acid
  Variant (94)..(97): Xaa in position 94 to 97 is any amino acid
  Variant (99)..(99): Xaa in position 99 is any amino acid
  Variant (101)..(107): Xaa in position 101 to 107 is any amino acid
  Variant (109)..(112): Xaa in position 109 to 112 is any amino acid
  Variant (114)..(114): Xaa in position 114 is any amino acid
  Variant (117)..(124): Xaa in position 117 to 124 is any amino acid
  Variant (125)..(125): Xaa in position 125 is any or no amino acid
  Variant (127)..(127): Xaa in position 127 is any amino acid
  Variant (129)..(130): Xaa in position 129 to 130 is any amino acid
  Variant (132)..(140): Xaa in position 132 to 140 is any amino acid
  Variant (144)..(145): Xaa in position 144 to 145 is any amino acid
  Variant (147)..(151): Xaa in position 147 to 151 is any amino acid
  Variant (153)..(156): Xaa in position 153 to 156 is any amino acid
  Variant (161)..(161): Xaa in position 161 is any amino acid
  Variant (163)..(165): Xaa in position 163 to 165 is any amino acid
  Variant (167)..(169): Xaa in position 167 to 169 is any amino acid
  Variant (171)..(180): Xaa in position 171 to 180 is any amino acid
  Variant (181)..(181): Xaa in position 181 is any or no amino acid
  Variant (184)..(189): Xaa in position 184 to 189 is any amino acid
  Variant (191)..(192): Xaa in position 191 to 192 is any amino acid
  Variant (195)..(197): Xaa in position 195 to 197 is any amino acid
  Variant (198)..(198): Xaa in position 198 is any or no amino acid
  Variant (200)..(200): Xaa in position 200 is any amino acid
  Variant (202)..(202): Xaa in position 202 is any amino acid
  Variant (205)..(205): Xaa in position 205 is any amino acid
  Variant (207)..(209): Xaa in position 207 to 209 is any amino acid
  Variant (211)..(215): Xaa in position 211 to 215 is any amino acid
  Variant (218)..(218): Xaa in position 218 is any amino acid
  Variant (221)..(226): Xaa in position 221 to 226 is any amino acid
  Variant (229)..(233): Xaa in position 229 to 233 is any amino acid
  Variant (234)..(236): Xaa in position 234 to 236 is any or no amino acid
  Variant (239)..(245): Xaa in position 239 to 245 is any amino acid
  Variant (246)..(247): Xaa in position 246 to 247 is any or no amino acid
  Variant (249)..(251): Xaa in position 249 to 251 is any amino acid
  Variant (252)..(256): Xaa in position 252 to 256 is any or no amino acid
  Variant (259)..(266): Xaa in position 259 to 266 is any amino acid
  Variant (268)..(268): Xaa in position 268 is any amino acid
  Variant (270)..(272): Xaa in position 270 to 272 is any amino acid
  Variant (274)..(274): Xaa in position 274 is any amino acid
  Variant (276)..(278): Xaa in position 276 to 278 is any amino acid
  Variant (280)..(282): Xaa in position 280 to 282 is any amino acid
  Variant (284)..(285): Xaa in position 284 to 285 is any amino acid
  Variant (288)..(288): Xaa in position 288 is any amino acid
  Variant (290)..(291): Xaa in position 290 to 291 is any amino acid
  Variant (293)..(293): Xaa in position 293 is any amino acid
  Variant (295)..(295): Xaa in position 295 is any amino acid
  Variant (297)..(300): Xaa in position 297 to 300 is any amino acid
  Variant (303)..(305): Xaa in position 303 to 305 is any amino acid
  Variant (307)..(313): Xaa in position 307 to 313 is any amino acid
  Variant (315)..(316): Xaa in position 315 to 316 is any amino acid
  Variant (319)..(323): Xaa in position 319 to 323 is any amino acid
  Variant (325)..(325): Xaa in position 325 is any amino acid
  Variant (327)..(332): Xaa in position 327 to 332 is any amino acid
  Variant (333)..(335): Xaa in position 333 to 335 is any or no amino acid
  Variant (338)..(338): Xaa in position 338 is any amino acid
  Variant (340)..(340): Xaa in position 340 is any amino acid
  Variant (342)..(350): Xaa in position 342 to 350 is any amino acid
  Variant (352)..(354): Xaa in position 352 to 354 is any amino acid
  Variant (360)..(360): Xaa in position 360 is any amino acid
  Variant (363)..(363): Xaa in position 363 is any amino acid
  Variant (365)..(366): Xaa in position 365 to 366 is any amino acid
  Variant (369)..(370): Xaa in position 369 to 370 is any amino acid
  Variant (372)..(374): Xaa in position 372 to 374 is any amino acid
  Variant (376)..(379): Xaa in position 376 to 379 is any amino acid
  Variant (381)..(383): Xaa in position 381 to 383 is any amino acid
  Variant (385)..(385): Xaa in position 385 is any amino acid
  Variant (389)..(391): Xaa in position 389 to 391 is any amino acid
  Variant (393)..(393): Xaa in position 393 is any amino acid
  Variant (396)..(396): Xaa in position 396 is any amino acid
  Variant (400)..(401): Xaa in position 400 to 401 is any amino acid
  Variant (403)..(413): Xaa in position 403 to 413 is any amino acid
  Variant (415)..(423): Xaa in position 415 to 423 is any amino acid
  Variant (424)..(429): Xaa in position 424 to 429 is any or no amino acid
  Variant (431)..(431): Xaa in position 431 is any amino acid
  Variant (434)..(434): Xaa in position 434 is any amino acid
  Variant (437)..(437): Xaa in position 437 is any amino acid
  Variant (441)..(442): Xaa in position 441 to 442 is any amino acid
  Variant (444)..(444): Xaa in position 444 is any amino acid
  Variant (446)..(447): Xaa in position 446 to 447 is any amino acid
  Variant (449)..(450): Xaa in position 449 to 450 is any amino acid
  Variant (453)..(453): Xaa in position 453 is any amino acid
  Variant (457)..(457): Xaa in position 457 is any amino acid
  Variant (459)..(461): Xaa in position 459 to 461 is any amino acid
  Variant (464)..(464): Xaa in position 464 is any amino acid
  Variant (467)..(467): Xaa in position 467 is any amino acid
  Variant (469)..(469): Xaa in position 469 is any amino acid
  Variant (471)..(475): Xaa in position 471 to 475 is any amino acid
  Variant (477)..(478): Xaa in position 477 to 478 is any amino acid
  Variant (481)..(493): Xaa in position 481 to 493 is any amino acid
  Variant (496)..(496): Xaa in position 496 is any amino acid
  Variant (498)..(500): Xaa in position 498 to 500 is any amino acid
  Variant (502)..(503): Xaa in position 502 to 503 is any amino acid
  Variant (504)..(508): Xaa in position 504 to 508 is any or no amino acid
  Variant (510)..(512): Xaa in position 510 to 512 is any amino acid
  Variant (513)..(515): Xaa in position 513 to 515 is any or no amino acid
  Variant (518)..(519): Xaa in position 518 to 519 is any amino acid
  Variant (523)..(523): Xaa in position 523 is any amino acid
  Variant (525)..(531): Xaa in position 525 to 531 is any amino acid
  Variant (534)..(547): Xaa in position 534 to 547 is any amino acid
  Variant (548)..(553): Xaa in position 548 to 553 is any or no amino acid
  Variant (556)..(586): Xaa in position 556 to 586 is any amino acid
  Variant (587)..(607): Xaa in position 587 to 607 is any or no amino acid

SEQ ID NO: 6138 - protein, 60 aa, Artificial sequence; identical to SEQ ID NO: 3941
  protein pattern
  Variant (3)..(3): Xaa in position 3 is any amino acid
  Variant (5)..(5): Xaa in position 5 is Ile, Leu or Val
  Variant (7)..(7): Xaa in position 7 is Ala, Ile or Val
  Variant (8)..(11): Xaa in position 8 to 11 is any amino acid
  Variant (12)..(12): Xaa in position 12 is Ile or Val
  Variant (13)..(13): Xaa in position 13 is Lys or Arg
  Variant (14)..(14): Xaa in position 14 is Ala, Gly, Ile or Val
  Variant (15)..(15): Xaa in position 15 is Ala, Ile, Leu or Val
  Variant (17)..(17): Xaa in position 17 is any amino acid
  Variant (18)..(18): Xaa in position 18 is Phe, Ile, Leu or Val
  Variant (19)..(19): Xaa in position 19 is Phe, Ile or Val
  Variant (24)..(24): Xaa in position 24 is Ile or Leu
  Variant (25)..(25): Xaa in position 25 is Ile, Leu or Met
  Variant (26)..(26): Xaa in position 26 is Ala or Ser
  Variant (27)..(28): Xaa in position 27 to 28 is any amino acid
  Variant (30)..(30): Xaa in position 30 is Met or Val
  Variant (31)..(31): Xaa in position 31 is Ala, Gly, Ser or Thr
  Variant (34)..(34): Xaa in position 34 is Ala, Cys, Ser or Thr
  Variant (35)..(35): Xaa in position 35 is any amino acid
  Variant (36)..(36): Xaa in position 36 is Phe or Tyr
  Variant (37)..(37): Xaa in position 37 is any amino acid
  Variant (38)..(38): Xaa in position 38 is Ala, Gly or Ser
  Variant (39)..(39): Xaa in position 39 is Ala, Gly, Pro or Ser
  Variant (41)..(41): Xaa in position 41 is any amino acid
  Variant (42)..(42): Xaa in position 42 is Phe, Ile, Leu or Met
  Variant (43)..(43): Xaa in position 43 is any amino acid
  Variant (44)..(44): Xaa in position 44 is Ala, Gly, Ser or Thr
  Variant (45)..(45): Xaa in position 45 is Leu or Met
  Variant (46)..(46): Xaa in position 46 is Ala or Ser
  Variant (47)..(50): Xaa in position 47 to 50 is any amino acid
  Variant (51)..(51): Xaa in position 51 is Ala, Gly, Ile or Leu
  Variant (53)..(54): Xaa in position 53 to 54 is any amino acid
  Variant (55)..(55): Xaa in position 55 is Phe or Leu
  Variant (56)..(56): Xaa in position 56 is any amino acid
  Variant (58)..(58): Xaa in position 58 is any amino acid

SEQ ID NO: 6139 - protein, 44 aa, Artificial sequence; identical to SEQ ID NO: 3942
  protein pattern
  Variant (2)..(3): Xaa in position 2 to 3 is any amino acid
  Variant (5)..(5): Xaa in position 5 is any amino acid
  Variant (7)..(7): Xaa in position 7 is Ile or Leu
  Variant (8)..(8): Xaa in position 8 is Ala or Ser
  Variant (9)..(9): Xaa in position 9 is Gly or Ser
  Variant (10)..(10): Xaa in position 10 is Ile or Leu
  Variant (11)..(11): Xaa in position 11 is Ala or Ser
  Variant (12)..(12): Xaa in position 12 is Glu, Asn, Gln, Ser or Thr
  Variant (13)..(13): Xaa in position 13 is any amino acid
  Variant (14)..(14): Xaa in position 14 is Phe or Ile
  Variant (15)..(15): Xaa in position 15 is any amino acid
  Variant (16)..(16): Xaa in position 16 is Trp or Tyr
  Variant (17)..(17): Xaa in position 17 is any amino acid
  Variant (18)..(18): Xaa in position 18 is Ala, Gly or Ser
  Variant (19)..(19): Xaa in position 19 is Ile or Met
  Variant (20)..(20): Xaa in position 20 is any amino acid
  Variant (21)..(21): Xaa in position 21 is Phe, Leu or Val
  Variant (22)..(22): Xaa in position 22 is Cys or Ser
  Variant (24)..(24): Xaa in position 24 is Phe, Ile, Leu or Val
  Variant (25)..(25): Xaa in position 25 is any amino acid
  Variant (26)..(26): Xaa in position 26 is Phe or Met
  Variant (28)..(28): Xaa in position 28 is any amino acid
  Variant (29)..(29): Xaa in position 29 is Ala or Cys
  Variant (30)..(30): Xaa in position 30 is Phe or Met
  Variant (31)..(35): Xaa in position 31 to 35 is any amino acid
  Variant (37)..(38): Xaa in position 37 to 38 is any amino acid
  Variant (39)..(39): Xaa in position 39 is Glu, Gln or Thr
  Variant (40)..(40): Xaa in position 40 is Ile, Leu or Val
  Variant (41)..(41): Xaa in position 41 is Glu or Gly
  Variant (42)..(42): Xaa in position 42 is Phe or Tyr
  Variant (43)..(43): Xaa in position 43 is any amino acid
  Variant (44)..(44): Xaa in position 44 is Ala or Ser

SEQ ID NO: 6140 - protein, 61 aa, Artificial sequence; identical to SEQ ID NO: 3943
  protein pattern
  Variant (2)..(4): Xaa in position 2 to 4 is any amino acid
  Variant (5)..(5): Xaa in position 5 is Ile, Leu or Met
  Variant (6)..(7): Xaa in position 6 to 7 is any amino acid
  Variant (10)..(10): Xaa in position 10 is Ile, Leu, Met or Val
  Variant (11)..(11): Xaa in position 11 is any amino acid
  Variant (12)..(12): Xaa in position 12 is Phe, Leu or Met
  Variant (13)..(13): Xaa in position 13 is Ile or Met
  Variant (14)..(14): Xaa in position 14 is Ala, Cys, Gly, Ser or Thr
  Variant (15)..(15): Xaa in position 15 is Ile, Leu or Val
  Variant (17)..(17): Xaa in position 17 is any or no amino acid
  Variant (19)..(19): Xaa in position 19 is any amino acid
  Variant (20)..(20): Xaa in position 20 is any or no amino acid
  Variant (22)..(22): Xaa in position 22 is Ser or Thr
  Variant (24)..(24): Xaa in position 24 is Leu or Val
  Variant (25)..(25): Xaa in position 25 is any amino acid
  Variant (26)..(26): Xaa in position 26 is Phe or Val
  Variant (27)..(27): Xaa in position 27 is Ala or Gly
  Variant (28)..(28): Xaa in position 28 is Asn or Ser
  Variant (29)..(29): Xaa in position 29 is Ala, Gly or Ser
  Variant (30)..(30): Xaa in position 30 is any amino acid
  Variant (31)..(31): Xaa in position 31 is Ala, Gly, Ser, Thr or Val
  Variant (32)..(32): Xaa in position 32 is Phe, Ile or Leu
  Variant (33)..(34): Xaa in position 33 to 34 is any amino acid
  Variant (35)..(35): Xaa in position 35 is Ala or Gly
  Variant (37)..(37): Xaa in position 37 is Ala or Pro
  Variant (38)..(38): Xaa in position 38 is Ala, Gly or Leu
  Variant (39)..(39): Xaa in position 39 is Ala, Gly or Ser
  Variant (40)..(40): Xaa in position 40 is Ala, Leu or Val
  Variant (41)..(41): Xaa in position 41 is Ile, Leu or Val
  Variant (42)..(42): Xaa in position 42 is Ile or Leu
  Variant (43)..(43): Xaa in position 43 is Ala, Asp, Gly or Asn
  Variant (44)..(44): Xaa in position 44 is Trp or Tyr
  Variant (45)..(45): Xaa in position 45 is any amino acid
  Variant (46)..(46): Xaa in position 46 is Ile, Leu or Met
  Variant (47)..(47): Xaa in position 47 is any amino acid
  Variant (48)..(48): Xaa in position 48 is Gly or Ser
  Variant (49)..(54): Xaa in position 49 to 54 is any amino acid
  Variant (55)..(55): Xaa in position 55 is Ile, Met or Val
  Variant (56)..(56): Xaa in position 56 is any amino acid
  Variant (57)..(57): Xaa in position 57 is Ala, Gly or Ser
  Variant (58)..(58): Xaa in position 58 is any amino acid
  Variant (61)..(61): Xaa in position 61 is Ile, Leu or Met

SEQ ID NO: 6141 - protein, 39 aa, Artificial sequence; identical to SEQ ID NO: 3944
  protein pattern
  Variant (2)..(2): Xaa in position 2 is any or no amino acid
  Variant (4)..(4): Xaa in position 4 is Ala, Ser or Val
  Variant (5)..(5): Xaa in position 5 is any amino acid
  Variant (6)..(6): Xaa in position 6 is Ala or Gly
  Variant (8)..(8): Xaa in position 8 is Ala or Gly
  Variant (10)..(10): Xaa in position 10 is any amino acid
  Variant (13)..(13): Xaa in position 13 is Phe, Ile, Leu, Met or Val
  Variant (14)..(14): Xaa in position 14 is Phe, Leu or Met
  Variant (15)..(15): Xaa in position 15 is Asn or Ser
  Variant (16)..(17): Xaa in position 16 to 17 is any amino acid
  Variant (19)..(19): Xaa in position 19 is Ile or Val
  Variant (20)..(23): Xaa in position 20 to 23 is any amino acid
  Variant (26)..(26): Xaa in position 26 is any or no amino acid
  Variant (28)..(28): Xaa in position 28 is Ile or Leu
  Variant (29)..(30): Xaa in position 29 to 30 is any amino acid
  Variant (31)..(31): Xaa in position 31 is Ala, Ile or Val
  Variant (32)..(32): Xaa in position 32 is Ile or Val
  Variant (33)..(33): Xaa in position 33 is any amino acid
  Variant (34)..(34): Xaa in position 34 is Ala, Cys, Asp, Asn, Thr or Val
  Variant (35)..(35): Xaa in position 35 is Ala, Cys or Gly
  Variant (37)..(37): Xaa in position 37 is any or no amino acid
  Variant (39)..(39): Xaa in position 39 is Ala, Asp, Gly, Asn, Thr or Val

SEQ ID NO: 6142 - protein, 39 aa, Artificial sequence; identical to SEQ ID NO: 3945
  protein pattern
  Variant (3)..(3): Xaa in position 3 is any amino acid
  Variant (4)..(4): Xaa in position 4 is Glu, Lys or Arg
  Variant (5)..(5): Xaa in position 5 is Ala, Asn, Ser or Thr
  Variant (6)..(6): Xaa in position 6 is any amino acid
  Variant (8)..(8): Xaa in position 8 is any amino acid
  Variant (10)..(10): Xaa in position 10 is any amino acid
  Variant (12)..(15): Xaa in position 12 to 15 is any or no amino acid
  Variant (17)..(17): Xaa in position 17 is Ile or Val
  Variant (18)..(18): Xaa in position 18 is Ala, Ile, Leu or Val
  Variant (19)..(19): Xaa in position 19 is any amino acid
  Variant (20)..(20): Xaa in position 20 is Phe, Ile, Leu or Val
  Variant (21)..(21): Xaa in position 21 is Phe or Tyr
  Variant (22)..(22): Xaa in position 22 is Ile, Leu, Met or Val
  Variant (23)..(23): Xaa in position 23 is any amino acid
  Variant (24)..(24): Xaa in position 24 is Ala, Ser or Thr
  Variant (25)..(26): Xaa in position 25 to 26 is any amino acid
  Variant (27)..(27): Xaa in position 27 is Ile or Leu
  Variant (28)..(28): Xaa in position 28 is Ile, Leu or Val
  Variant (29)..(29): Xaa in position 29 is Cys or Gly
  Variant (30)..(30): Xaa in position 30 is Phe or Leu
  Variant (31)..(31): Xaa in position 31 is any amino acid
  Variant (32)..(32): Xaa in position 32 is Ile or Val
  Variant (33)..(34): Xaa in position 33 to 34 is any amino acid
  Variant (35)..(35): Xaa in position 35 is Asp or Asn
  Variant (36)..(36): Xaa in position 36 is Asp, Asn or Ser
  Variant (37)..(37): Xaa in position 37 is any amino acid
  Variant (38)..(38): Xaa in position 38 is Glu, Asn, Gln or Arg

SEQ ID NO: 6143 - protein, 24 aa, Artificial sequence
  protein pattern
  Variant (3)..(3): Xaa in position 3 is any amino acid
  Variant (4)..(4): Xaa in position 4 is any or no amino acid
  Variant (8)..(8): Xaa in position 8 is any amino acid
  Variant (9)..(9): Xaa in position 9 is Cys or Pro
  Variant (10)..(10): Xaa in position 10 is Ile, Leu or Val
  Variant (11)..(11): Xaa in position 11 is any amino acid
  Variant (12)..(12): Xaa in position 12 is Ile or Leu
  Variant (13)..(14): Xaa in position 13 to 14 is any amino acid
  Variant (15)..(15): Xaa in position 15 is Phe or Tyr
  Variant (16)..(16): Xaa in position 16 is Phe, Ile, Leu or Val
  Variant (18)..(18): Xaa in position 18 is His or Tyr
  Variant (19)..(22): Xaa in position 19 to 22 is any amino acid
  Variant (23)..(23): Xaa in position 23 is Lys or Arg
  Variant (24)..(24): Xaa in position 24 is Asp, Glu, Ser or Thr
FFXXYLAXXXXXXXXXGXXXXXXX

SEQ ID NO: 6144 - protein, 27 aa, Artificial sequence
  protein pattern
  Variant (3)..(3): Xaa in position 3 is Gly or Asn
  Variant (4)..(4): Xaa in position 4 is Phe, Ile, Leu or Val
  Variant (5)..(7): Xaa in position 5 to 7 is any amino acid
  Variant (8)..(8): Xaa in position 8 is Phe, Leu or Met
  Variant (9)..(9): Xaa in position 9 is Cys, Thr or Val
  Variant (10)..(10): Xaa in position 10 is any amino acid
  Variant (11)..(11): Xaa in position 11 is Ala, Gly or Ser
  Variant (12)..(12): Xaa in position 12 is any amino acid
  Variant (14)..(14): Xaa in position 14 is Ala or Ser
  Variant (15)..(15): Xaa in position 15 is Phe or Tyr
  Variant (16)..(16): Xaa in position 16 is Ala, Gly or Ser
  Variant (17)..(17): Xaa in position 17 is Ala or Gly
  Variant (18)..(18): Xaa in position 18 is any amino acid
  Variant (20)..(20): Xaa in position 20 is any amino acid
  Variant (21)..(21): Xaa in position 21 is Phe, Ile, Leu, Met or Val
  Variant (22)..(22): Xaa in position 22 is any amino acid
  Variant (23)..(23): Xaa in position 23 is Ile, Leu or Val
  Variant (24)..(24): Xaa in position 24 is Ala, Ser or Thr
  Variant (25)..(25): Xaa in position 25 is any amino acid
  Variant (26)..(26): Xaa in position 26 is Ala, Asn, Gln or Ser
FKXXXXXXXXXXFXXXXXEXXXXXXXE

SEQ ID NO: 6145 - DNA, 1503 bp, Saccharomyces cerevisiae
  CDS (1)..(1503)
atgaagtataataacagaaaactctcgttcaaccctaccacagtaagtatcgctggaacgttgcttacggtgttctttctcacaagactcgtgctttcgttcttctcgatatcgctattccagctggtaactttccaaggaatcttcaagccctatgttccagattttaaaaatactcccagcgtagagttctacgacctacgaaattaccaaggcaacaaagatggttggcaacagggtgaccgcatcttgttttgcgtgccactgagagatgcttctgagcatcttcccatgttttttaaccatctgaataccatgacatatccgcacaacctgattgatctgtcgtttttggtgagtgactcttcggataacaccatgggcgtgttactatccaatctacagatggcgcaatcgcaacaagacaagtccaaaaggtttggtaacatcgaaatctatgagaaggacttcggccaaatcattggtcagtccttttctgatcgtcacgggtttggcgcccagggccccagaagaaagctgatggccagggctcgtaattggcctgggtccgtggccctgaaaccataccactcctgggtttactggagagacgtggatgtcgaaaccatccccactaccatcatggaggatctaatgcatcacgacaaggacgtcattgtccccaacgtctggagacctttaccagactggctgggaaacattcaaccctacgatttaaattcatggaaggaatcagaagggggtcttcaattggcggattccctagacgaagatgctgtcattgtggaagggtacccagagtacgccacttggagacctcacctggcatacatgagagacccaaacggtaatccagaagacgaaatggaattggacggtattggaggggtctcgattctcgcgaaagctaaagtattcagaacaggctcacactttcctgcattctcctttgaaaagcacgcagagacagaagcattcggtaggctctcccgcaggatgaattacaatgtcatcggcttgccccattatgtcatctggcacatctacgaaccttccagcgacgacttaaagcacatggcttggatggctgaagaggagaagcggaaactagaagaagagagaattcgcgaattttacaacaagatctgggagattggatttgaagatgtcagagaccaatggaacgaagaaagagattcaatcttaaaaaacattgactccactttgaacaataaagtcactgtagactggtctgaagagggagatggctcggagctggtggactcaaagggtgactttgtctcaccaaacaaccaacaacaacaacaacagcaacaacaacaacaacagcagcagcagcaacagcaacagcaacaacagctcgacggcaacccgcaggggaaacctcttgatgacaacgacaagaacaagaaaaaacatcctaaagaagttccattagacttcgaccctgatagaaactag

SEQ ID NO: 6146 - protein, 500 aa, Saccharomyces cerevisiae
MKYNNRKLSFNPTTVSIAGTLLTVFFLTRLVLSFFSISLFQLVTFQGIFKPYVPDFKNTPSVEFYDLRNYQGNKDGWQQGDRILFCVPLRDASEHLPMFFNHLNTMTYPHNLIDLSFLVSDSSDNTMGVLLSNLQMAQSQQDKSKRFGNIEIYEKDFGQIIGQSFSDRHGFGAQGPRRKLMARARNWPGSVALKPYHSWVYWRDVDVETIPTTIMEDLMHHDKDVIVPNVWRPLPDWLGNIQPYDLNSWKESEGGLQLADSLDEDAVIVEGYPEYATWRPHLAYMRDPNGNPEDEMELDGIGGVSILAKAKVFRTGSHFPAFSFEKHAETEAFGRLSRRMNYNVIGLPHYVIWHIYEPSSDDLKHMAWMAEEEKRKLEEERIREFYNKIWEIGFEDVRDQWNEERDSILKNIDSTLNNKVTVDWSEEGDGSELVDSKGDFVSPNNQQQQQQQQQQQQQQQQQQQQQQLDGNPQGKPLDDNDKNKKKHPKEVPLDFDPDRN

SEQ ID NO: 6147 - DNA, 1380 bp, Magnaporthe grisea 70-15; identical to SEQ ID NO: 3950
  CDS (1)..(1380)

SEQ ID NO: 6148 - protein, 459 aa, Magnaporthe grisea 70-15; identical to SEQ ID NO: 3951

SEQ ID NO: 6149 - DNA, 1488 bp, Gibberella zeae PH-1 (anamorph: Fusarium graminearum); identical to SEQ ID NO: 3952
  CDS (1)..(1488)

SEQ ID NO: 6150 - protein, 495 aa, Gibberella zeae PH-1 (anamorph: Fusarium graminearum); identical to SEQ ID NO: 3953

SEQ ID NO: 6151 - DNA, 1539 bp, Candida glabrata CBS 138; identical to SEQ ID NO: 3954
  CDS (1)..(1539)

SEQ ID NO: 6152 - protein, 512 aa, Candida glabrata CBS 138; identical to SEQ ID NO: 3955

SEQ ID NO: 6153 - DNA, 1344 bp, Candida glabrata CBS 138; identical to SEQ ID NO: 3956
  CDS (1)..(1344)

SEQ ID NO: 6154 - protein, 447 aa, Candida glabrata CBS 138; identical to SEQ ID NO: 3957

SEQ ID NO: 6155 - DNA, 1506 bp, Kluyveromyces lactis NRRL Y-1140; identical to SEQ ID NO: 3958
  CDS (1)..(1506)

SEQ ID NO: 6156 - protein, 501 aa, Kluyveromyces lactis NRRL Y-1140; identical to SEQ ID NO: 3959

SEQ ID NO: 6157 - DNA, 1353 bp, Kluyveromyces lactis NRRL Y-1140; identical to SEQ ID NO: 3960
  CDS (1)..(1353)

SEQ ID NO: 6158 - protein, 450 aa, Kluyveromyces lactis NRRL Y-1140; identical to SEQ ID NO: 3961

SEQ ID NO: 6159 - DNA, 1335 bp, Debaryomyces hansenii CBS767; identical to SEQ ID NO: 3962
  CDS (1)..(1335): transl_table=12

SEQ ID NO: 6160 - protein, 444 aa, Debaryomyces hansenii CBS767; identical to SEQ ID NO: 3963

SEQ ID NO: 6161 - DNA, 1326 bp, Debaryomyces hansenii CBS767; identical to SEQ ID NO: 3964
  CDS (1)..(1326): transl_table=12

SEQ ID NO: 6162 - protein, 441 aa, Debaryomyces hansenii CBS767; identical to SEQ ID NO: 3965

SEQ ID NO: 6163 - DNA, 1401 bp, Yarrowia lipolytica CLIB122; identical to SEQ ID NO: 3966
  CDS (1)..(1401)

SEQ ID NO: 6164 - protein, 466 aa, Yarrowia lipolytica CLIB122; identical to SEQ ID NO: 3967

SEQ ID NO: 6165 - DNA, 1356 bp, Yarrowia lipolytica CLIB122; identical to SEQ ID NO: 3968
  CDS (1)..(1356)

SEQ ID NO: 6166 - protein, 451 aa, Yarrowia lipolytica CLIB122; identical to SEQ ID NO: 3969

SEQ ID NO: 6167 - DNA, 1287 bp, Candida albicans SC5314; identical to SEQ ID NO: 3970
  CDS (1)..(1287): transl_table=12

SEQ ID NO: 6168 - protein, 428 aa, Candida albicans SC5314; identical to SEQ ID NO: 3971

SEQ ID NO: 6169 - DNA, 1524 bp, Candida albicans SC5314; identical to SEQ ID NO: 3972
  CDS (1)..(1524): transl_table=12

SEQ ID NO: 6170 - protein, 507 aa, Candida albicans SC5314; identical to SEQ ID NO: 3973

SEQ ID NO: 6171 - DNA, 1353 bp, Hansenula anomala; identical to SEQ ID NO: 3974
  CDS (1)..(1353)

SEQ ID NO: 6172 - protein, 450 aa, Hansenula anomala; identical to SEQ ID NO: 3975

SEQ ID NO: 6173 - DNA, 1347 bp, Neurospora crassa; identical to SEQ ID NO: 3976
  CDS (1)..(1347)

SEQ ID NO: 6174 - protein, 448 aa, Neurospora crassa; identical to SEQ ID NO: 3977

SEQ ID NO: 6175 - DNA, 1329 bp, Candida albicans; identical to SEQ ID NO: 3978
  CDS (1)..(1329): transl_table=12

SEQ ID NO: 6176 - protein, 442 aa, Candida albicans; identical to SEQ ID NO: 3979

SEQ ID NO: 6177 - DNA, 1608 bp, Saccharomyces cerevisiae; identical to SEQ ID NO: 3980
  CDS (1)..(1608)

SEQ ID NO: 6178 - protein, 535 aa, Saccharomyces cerevisiae; identical to SEQ ID NO: 3981

SEQ ID NO: 6179 - DNA, 1293 bp, Schizosaccharomyces pombe; identical to SEQ ID NO: 3982
  CDS (1)..(1293)

SEQ ID NO: 6180 - protein, 430 aa, Schizosaccharomyces pombe; identical to SEQ ID NO: 3983

SEQ ID NO: 6181 - DNA, 27 bp, Artificial sequence
  primer
atgaagtataataacagaaaactctcg

SEQ ID NO: 6182 - DNA, 24 bp, Artificial sequence
  primer
ctagtttctatcagggtcgaagtc

SEQ ID NO: 6183 - protein, 354 aa, Artificial sequence; identical to SEQ ID NO: 3986
  consensus sequence
  Variant (2)..(4): Xaa in position 2 to 4 is any amino acid
  Variant (7)..(10): Xaa in position 7 to 10 is any amino acid
  Variant (12)..(14): Xaa in position 12 to 14 is any amino acid
  Variant (15)..(15): Xaa in position 15 is any or no amino acid
  Variant (17)..(23): Xaa in position 17 to 23 is any amino acid
  Variant (24)..(25): Xaa in position 24 to 25 is any or no amino acid
  Variant (27)..(29): Xaa in position 27 to 29 is any amino acid
  Variant (33)..(33): Xaa in position 33 is any amino acid
  Variant (35)..(37): Xaa in position 35 to 37 is any amino acid
  Variant (39)..(39): Xaa in position 39 is any amino acid
  Variant (41)..(41): Xaa in position 41 is any amino acid
  Variant (43)..(48): Xaa in position 43 to 48 is any amino acid
  Variant (51)..(51): Xaa in position 51 is any amino acid
  Variant (53)..(53): Xaa in position 53 is any amino acid
  Variant (57)..(58): Xaa in position 57 to 58 is any amino acid
  Variant (64)..(65): Xaa in position 64 to 65 is any amino acid
  Variant (66)..(67): Xaa in position 66 to 67 is any or no amino acid
  Variant (69)..(69): Xaa in position 69 is any amino acid
  Variant (71)..(73): Xaa in position 71 to 73 is any amino acid
  Variant (75)..(81): Xaa in position 75 to 81 is any amino acid
  Variant (83)..(88): Xaa in position 83 to 88 is any amino acid
  Variant (89)..(138): Xaa in position 89 to 138 is any or no amino acid
  Variant (140)..(143): Xaa in position 140 to 143 is any amino acid
  Variant (145)..(146): Xaa in position 145 to 146 is any amino acid
  Variant (152)..(153): Xaa in position 152 to 153 is any amino acid
  Variant (156)..(156): Xaa in position 156 is any amino acid
  Variant (162)..(165): Xaa in position 162 to 165 is any amino acid
  Variant (168)..(168): Xaa in position 168 is any amino acid
  Variant (174)..(174): Xaa in position 174 is any amino acid
  Variant (181)..(183): Xaa in position 181 to 183 is any amino acid
  Variant (185)..(186): Xaa in position 185 to 186 is any amino acid
  Variant (197)..(197): Xaa in position 197 is any amino acid
  Variant (199)..(199): Xaa in position 199 is any amino acid
  Variant (201)..(202): Xaa in position 201 to 202 is any amino acid
  Variant (204)..(207): Xaa in position 204 to 207 is any amino acid
  Variant (212)..(212): Xaa in position 212 is any amino acid
  Variant (214)..(215): Xaa in position 214 to 215 is any amino acid
  Variant (228)..(229): Xaa in position 228 to 229 is any amino acid
  Variant (232)..(233): Xaa in position 232 to 233 is any amino acid
  Variant (242)..(242): Xaa in position 242 is any amino acid
  Variant (245)..(247): Xaa in position 245 to 247 is any amino acid
  Variant (249)..(249): Xaa in position 249 is any amino acid
  Variant (252)..(253): Xaa in position 252 to 253 is any amino acid
  Variant (255)..(255): Xaa in position 255 is any amino acid
  Variant (258)..(258): Xaa in position 258 is any amino acid
  Variant (265)..(265): Xaa in position 265 is any amino acid
  Variant (268)..(268): Xaa in position 268 is any amino acid
  Variant (272)..(272): Xaa in position 272 is any amino acid
  Variant (277)..(277): Xaa in position 277 is any amino acid
  Variant (280)..(281): Xaa in position 280 to 281 is any amino acid
  Variant (283)..(283): Xaa in position 283 is any amino acid
  Variant (285)..(290): Xaa in position 285 to 290 is any amino acid
  Variant (293)..(293): Xaa in position 293 is any amino acid
  Variant (300)..(301): Xaa in position 300 to 301 is any amino acid
  Variant (303)..(304): Xaa in position 303 to 304 is any amino acid
  Variant (307)..(307): Xaa in position 307 is any amino acid
  Variant (309)..(309): Xaa in position 309 is any amino acid
  Variant (315)..(315): Xaa in position 315 is any amino acid
  Variant (317)..(318): Xaa in position 317 to 318 is any amino acid
  Variant (324)..(324): Xaa in position 324 is any amino acid
  Variant (328)..(331): Xaa in position 328 to 331 is any amino acid
  Variant (334)..(335): Xaa in position 334 to 335 is any amino acid
  Variant (337)..(337): Xaa in position 337 is any amino acid
  Variant (343)..(343): Xaa in position 343 is any amino acid
  Variant (347)..(347): Xaa in position 347 is any amino acid
  Variant (352)..(352): Xaa in position 352 is any amino acid

SEQ ID NO: 6184 - protein, 58 aa, Artificial sequence; identical to SEQ ID NO: 3987
  protein pattern
  Variant (5)..(5): Xaa in position 5 is Phe, Trp or Tyr
  Variant (11)..(11): Xaa in position 11 is Ala or Val
  Variant (13)..(13): Xaa in position 13 is Ile or Val
  Variant (14)..(14): Xaa in position 14 is Glu or Gln
  Variant (15)..(16): Xaa in position 15 to 16 is any amino acid
  Variant (18)..(18): Xaa in position 18 is any amino acid
  Variant (19)..(19): Xaa in position 19 is Asp, Ser or Thr
  Variant (20)..(20): Xaa in position 20 is Ile or Val
  Variant (21)..(21): Xaa in position 21 is Ile, Leu or Met
  Variant (22)..(22): Xaa in position 22 is Glu or Gln
  Variant (23)..(23): Xaa in position 23 is Asp or Glu
  Variant (26)..(27): Xaa in position 26 to 27 is any amino acid
  Variant (28)..(28): Xaa in position 28 is Asp, Gly or Asn
  Variant (29)..(29): Xaa in position 29 is any amino acid
  Variant (31)..(31): Xaa in position 31 is Ile or Val
  Variant (32)..(32): Xaa in position 32 is Ile or Met
  Variant (37)..(37): Xaa in position 37 is Trp or Tyr
  Variant (42)..(42): Xaa in position 42 is any amino acid
  Variant (43)..(43): Xaa in position 43 is Phe or Trp
  Variant (45)..(45): Xaa in position 45 is Gly or Asn
  Variant (46)..(46): Xaa in position 46 is Gly, Asn, Ser or Thr
  Variant (47)..(47): Xaa in position 47 is any amino acid
  Variant (49)..(49): Xaa in position 49 is Ala or Pro
  Variant (56)..(56): Xaa in position 56 is any amino acid

SEQ ID NO: 6185 - protein, 60 aa, Artificial sequence; identical to SEQ ID NO: 3988
  protein pattern
  Variant (2)..(3): Xaa in position 2 to 3 is any amino acid
  Variant (9)..(9): Xaa in position 9 is Ala, Ser or Thr
  Variant (10)..(10): Xaa in position 10 is Lys or Arg
  Variant (12)..(12): Xaa in position 12 is any amino acid
  Variant (13)..(13): Xaa in position 13 is Ile, Leu or Val
  Variant (16)..(16): Xaa in position 16 is any amino acid
  Variant (18)..(19): Xaa in position 18 to 19 is any amino acid
  Variant (21)..(21): Xaa in position 21 is Pro or Ser
  Variant (24)..(24): Xaa in position 24 is Ser or Thr
  Variant (26)..(27): Xaa in position 26 to 27 is any amino acid
  Variant (33)..(33): Xaa in position 33 is Ala or Gly
  Variant (36)..(36): Xaa in position 36 is Lys or Arg
  Variant (37)..(37): Xaa in position 37 is Leu or Met
  Variant (38)..(38): Xaa in position 38 is Ala, Cys or Ser
  Variant (39)..(39): Xaa in position 39 is Lys or Arg
  Variant (40)..(40): Xaa in position 40 is any amino acid
  Variant (41)..(41): Xaa in position 41 is Met or Val
  Variant (42)..(42): Xaa in position 42 is Asp, Gly, Asn or Gln
  Variant (43)..(44): Xaa in position 43 to 44 is any amino acid
  Variant (46)..(46): Xaa in position 46 is Gly, Ile or Val
  Variant (49)..(49): Xaa in position 49 is any amino acid
  Variant (52)..(52): Xaa in position 52 is Thr or Val
  Variant (53)..(53): Xaa in position 53 is Ile or Leu
  Variant (56)..(56): Xaa in position 56 is Ile or Leu

SEQ ID NO: 6186 - protein, 43 aa, Artificial sequence; identical to SEQ ID NO: 3989
  protein pattern
  Variant (2)..(3): Xaa in position 2 to 3 is any amino acid
  Variant (8)..(8): Xaa in position 8 is Ala or Gln
  Variant (9)..(9): Xaa in position 9 is any amino acid
  Variant (10)..(10): Xaa in position 10 is Phe, Ile or Val
  Variant (11)..(11): Xaa in position 11 is Gly or Asn
  Variant (13)..(13): Xaa in position 13 is Asp, Glu, Gly or Ser
  Variant (14)..(14): Xaa in position 14 is Phe or Val
  Variant (15)..(15): Xaa in position 15 is Glu or Ser
  Variant (16)..(16): Xaa in position 16 is Asp or Ser
  Variant (19)..(19): Xaa in position 19 is Ala or Gly
  Variant (20)..(20): Xaa in position 20 is Phe or Val
  Variant (21)..(21): Xaa in position 21 is any amino acid
  Variant (22)..(22): Xaa in position 22 is Ala or Val
  Variant (24)..(24): Xaa in position 24 is Ala or Gly
  Variant (25)..(25): Xaa in position 25 is any amino acid
  Variant (31)..(32): Xaa in position 31 to 32 is any or no amino acid
  Variant (35)..(36): Xaa in position 35 to 36 is any or no amino acid
  Variant (40)..(40): Xaa in position 40 is any amino acid
  Variant (41)..(41): Xaa in position 41 is Ala, Ser or Thr
  Variant (42)..(42): Xaa in position 42 is Ala, Asn or Val

SEQ ID NO: 6187 - protein, 57 aa, Artificial sequence; identical to SEQ ID NO: 3990
  protein pattern
  Variant (2)..(3): Xaa in position 2 to 3 is any amino acid
  Variant (4)..(4): Xaa in position 4 is Asp, Glu, Asn or Arg
  Variant (6)..(9): Xaa in position 6 to 9 is any amino acid
  Variant (10)..(10): Xaa in position 10 is Asp or Glu
  Variant (11)..(11): Xaa in position 11 is any amino acid
  Variant (12)..(12): Xaa in position 12 is Ile, Leu or Val
  Variant (13)..(13): Xaa in position 13 is Leu or Val
  Variant (14)..(14): Xaa in position 14 is Phe, Leu, Met or Val
  Variant (15)..(15): Xaa in position 15 is any amino acid
  Variant (16)..(16): Xaa in position 16 is Ile, Met or Val
  Variant (20)..(20): Xaa in position 20 is Asp or Asn
  Variant (22)..(22): Xaa in position 22 is Ala, Glu or Ser
  Variant (23)..(24): Xaa in position 23 to 24 is any amino acid
  Variant (26)..(26): Xaa in position 26 is any amino acid
  Variant (27)..(27): Xaa in position 27 is any or no amino acid
  Variant (29)..(29): Xaa in position 29 is any or no amino acid
  Variant (31)..(36): Xaa in position 31 to 36 is any amino acid
  Variant (37)..(37): Xaa in position 37 is any or no amino acid
  Variant (40)..(40): Xaa in position 40 is Asp or Pro
  Variant (42)..(42): Xaa in position 42 is any amino acid
  Variant (46)..(46): Xaa in position 46 is Ile or Leu
  Variant (47)..(47): Xaa in position 47 is Ala or Ser
  Variant (53)..(53): Xaa in position 53 is Cys or Ser
  Variant (54)..(54): Xaa in position 54 is any amino acid
  Variant (55)..(55): Xaa in position 55 is Asp, Glu or Pro
  Variant (56)..(56): Xaa in position 56 is any amino acid
  Variant (57)..(57): Xaa in position 57 is Asp, Gly or Thr

SEQ ID NO: 6188 - protein, 38 aa, Artificial sequence; identical to SEQ ID NO: 3991
  protein pattern
  Variant (2)..(2): Xaa in position 2 is any amino acid
  Variant (5)..(5): Xaa in position 5 is Ala, Asp or Ser
  Variant (6)..(6): Xaa in position 6 is Cys or Val
  Variant (12)..(12): Xaa in position 12 is Ala, Pro or Val
  Variant (15)..(15): Xaa in position 15 is any amino acid
  Variant (19)..(19): Xaa in position 19 is Ala, Pro, Thr or Val
  Variant (22)..(22): Xaa in position 22 is Ala or Gly
  Variant (24)..(24): Xaa in position 24 is Ile, Leu or Met
  Variant (26)..(26): Xaa in position 26 is Asp or Lys
  Variant (27)..(27): Xaa in position 27 is Ala, Asp or Pro
  Variant (28)..(28): Xaa in position 28 is any amino acid
  Variant (30)..(30): Xaa in position 30 is Asp or Asn
  Variant (31)..(34): Xaa in position 31 to 34 is any amino acid
  Variant (35)..(35): Xaa in position 35 is Ile, Leu, Met or Val
  Variant (36)..(36): Xaa in position 36 is any amino acid
  Variant (37)..(37): Xaa in position 37 is Ile or Leu

SEQ ID NO: 6189 - DNA, 444 bp, Saccharomyces cerevisiae; identical to SEQ ID NO: 3268
  CDS (1)..(444)

SEQ ID NO: 6190 - protein, 147 aa, Saccharomyces cerevisiae; identical to SEQ ID NO: 3269

SEQ ID NO: 6191 - DNA, 519 bp, Oryza sativa
  CDS (1)..(519)
atggattcgacggagctgaggaaggtgttcaagatgttcgacaagaacggcgacgggaggatcaccaagaaggagctgggcgagtcgttcaagaacttcggcatcttcatccccgacgacgagctcgacgccaccatggacaagatcgacgccaacggcgacggctgcgtcgacgtcgaggagttcggcctcctctaccgctccatcctcggcgacgacgccgccggccgagcccccaggacggcggcggcggccatcggcggcgagggcggcgcccccgacgacgaggacgaggggatgcgggaggcgttcaacgtgttcgaccagaacggcgacggattcatcaccgtcgacgagctccggtccgtgctgtccagcctcgggctcaagcatggccgcaccgccgacgactgccgccggatgatcagcatggtggacgccgacggcgacggccgcgtcgacttcaaggagttcaagcagatgatgcgcggcggcgggttcgccgcgctcggtggctag

SEQ ID NO: 6192 - protein, 172 aa, Oryza sativa
MDSTELRKVFKMFDKNGDGRITKKELGESFKNFGIFIPDDELDATMDKIDANGDGCVDVEEFGLLYRSILGDDAAGRAPRTAAAAIGGEGGAPDDEDEGMREAFNVFDQNGDGFITVDELRSVLSSLGLKHGRTADDCRRMISMVDADGDGRVDFKEFKQMMRGGGFAALGG

SEQ ID NO: 6193 - DNA, 627 bp, Brassica napus
  CDS (1)..(627)
atgaaattcgccaaactgaatccaaaacgtttgttcagatccaaagaccgttcaacggtctctaaatccaccgcttcctctttctcctccggcgccgcggacgagtgtaataatcactcatccgccgtcaccggaggctccgtcactcccaccagcatcctcccggaggtctcggccgttcattctccctactcgtacgtcgagatcctccaggcgttcaagctcatcgacagagacaacgacggagccgtctcgaggcacgacctcgagtcgctcctcacgcgcctcgggcccgatcctccgacggaggaggagatcgacgtcatgctcaaggaggtggactgcgacggagacggtacggttcgcctggaagagctcgccagccgctgcgtcgatgatgatcagtctcgcggtggctcggacgagctgaaggagacgttcgagttcttcgacgcggatcgcgacggtaagatctctgcggaggagcttctccgagttttctcggctattggagacgagcggtgcacgttagaggagtgcgagcgtatgatagcggccgttgacgatgacggtaacggattcgtgtgtttcactgagttctcgagaatgatggatctccagcgatga

SEQ ID NO: 6194 - protein, 208 aa, Brassica napus
MKFAKLNPKRLFRSKDRSTVSKSTASSFSSGAADECNNHSSAVTGGSVTPTSILPEVSAVHSPYSYVEILQAFKLIDRDNDGAVSRHDLESLLTRLGPDPPTEEEIDVMLKEVDCDGDGTVRLEELASRCVDDDQSRGGSDELKETFEFFDADRDGKISAEELLRVFSAIGDERCTLEECERMIAAVDDDGNGFVCFTEFSRMMDLQR

SEQ ID NO: 6195 - DNA, 645 bp, Brassica napus
  CDS (1)..(645)
atggtgagaatattccttctctataatctattaaactcttttcttctctctttagtaccaaagaaactgcgaactctcttctctctctcttggttcgacaaaactctccacaagaactcaccaccgtcaccgtccatgttaccctctccgtcaccatcctccacgccgacgacaaagatagacccgtccgagctaaaaagggtttttcagacgttcgacaagaacggagacggtcgtattactaaacaagagctcaaggactcactagagaatcttggaatctacataccagacaaagacctaactcaaatgatccacaacatcgacacaaaccacgatggatgcgttgacatagacgagttcgagtctctgtacagatccattgtcaatgagcatcacaacgatggagaaaccaaagaagaggacatgaaagaagcgtttaacgtgtttgaccaggatggagatgggtttatcactgtcgaggagttgaaatctgtgatgtcttccttgggactcaagcaaggtaaaaccctagaaggttgcaagaagatgattatgcaagtggatgttgatggtgatggtagagttaattacaaagagtttcttcaaatgatgaaaggtgatgggtttagccgtagtagttga

SEQ ID NO: 6196 - protein, 214 aa, Brassica napus
MVRIFLLYNLLNSFLLSLVPKKLRTLFSLSWFDKTLHKNSPPSPSMLPSPSPSSTPTTKIDPSELKRVFQTFDKNGDGRITKQELKDSLENLGIYIPDKDLTQMIHNIDTNHDGCVDIDEFESLYRSIVNEHHNDGETKEEDMKEAFNVFDQDGDGFITVEELKSVMSSLGLKQGKTLEGCKKMIMQVDVDGDGRVNYKEFLQMMKGDGFSRSS

SEQ ID NO: 6197 - DNA, 570 bp, Glycine max
  CDS (1)..(570)
atgtcgaatttgagtttccttcaatttcatagtagcaactcgttggggcactcctcttttcaacccaatagtccaaacccgaacaacaacataaaatcatcaaaacagacatcaaatgtagggtgcaatattcagccaaagtcagaggaaatgaaatgggtgttcgacaagtttgacaccaacaaagatggcaagattaccctcgaagagtacaaagcagcagtgagaacaatggggtggggaatcgaaggcactgagactgatgagtcttttcaggtgatggactctgatggagatggcttcattgacttcaaagagttcatggacatgttcaacgtggaggagagggtgaaagagacggagatcaagagtgcttttcaagtgtttgatttgaatggcgatgggaaaatcagtgcagaggaattgtcacaagttctcaaaagcctaggggaaagttgcagccttagtgcttgtaagaaaatggtgatgggggtggatagaaatggggatggctttatagacttgaatgagtttatgaggatgatgatgagttgcaagaaactcacctaa

SEQ ID NO: 6198 - protein, 189 aa, Glycine max
MSNLSFLQFHSSNSLGHSSFQPNSPNPNNNIKSSKQTSNVGCNIQPKSEEMKWVFDKFDTNKDGKITLEEYKAAVRTMGWGIEGTETDESFQVMDSDGDGFIDFKEFMDMFNVEERVKETEIKSAFQVFDLNGDGKISAEELSQVLKSLGESCSLSACKKMVMGVDRNGDGFIDLNEFMRMMMSCKKLT

SEQ ID NO: 6199 - DNA, 564 bp, Glycine max
  CDS (1)..(564)
atgtcgaatttgagtttcctaaagttcaattatagcttctcatggaagccttcctcttcacgcaaaaatgtatccaagaagaacagcttcgtatcaagacagacatcgaatgaaggacaaagtttccaaccaacaaaagaggaaatgaaatgggtgttccagaaatttgacaccaacagagacggcaaggtttctcttgaagagtacaaggctgctgcaagggccttggatagggccattggggaagctgaagcagtgaaagcatttagggtcatggacattgatggagatggcttcattgacttgaatgagttcatggagaagttcaatggagaaggtaggataaaagaaactgagatcaagaatgcttttcaagtgtttgatttgaacggtgatgggaagattagtgctgaggagttgtctcatgttctcaaaaggctaggagagagttgcagccttaatgcctgtaaaaaaatggtcaaaggagtggatgggaatggagatggttttattgacttgaatgagtttacaaggatgatgatgagtgggaagaaactaggctaa

SEQ ID NO: 6200 - protein, 187 aa, Glycine max
MSNLSFLKFNYSFSWKPSSSRKNVSKKNSFVSRQTSNEGQSFQPTKEEMKWVFQKFDTNRDGKVSLEEYKAAARALDRAIGEAEAVKAFRVMDIDGDGFIDLNEFMEKFNGEGRIKETEIKNAFQVFDLNGDGKISAEELSHVLKRLGESCSLNACKKMVKGVDGNGDGFIDLNEFTRMMMSGKKLG

SEQ ID NO: 6201 - DNA, 645 bp, Glycine max
  CDS (1)..(645)
atgatgagaatattccttctctatcatctattaaactcttttcttctctctttagtaccaaagaaactgcgaactctcttctctctctcttggttcgacaaaactctccacaagaactcaccaccgtcaccgtccatgttaccctctccgtcaccatcctccacgccgacgacaaaaatagacccgtccgagctaaaaagggtttttcagacgttcgacaagaacggagacggtcgtatcactaaacaagagctcaaggactcactagagaatcttggaatctacataccagacaaagacctaactcaaatgatccacaacatcgacacgaaccacgatggatgcgttgacatagacgagttcgagtctctgtacaaatccattgtcgatgagcatcacaacgatggagaaaccgaagaagaggacatgaaagaagcctttaacgtgtttgaccaggacggagatgggtttatcactgtggaggagttgaaatctgtgatgggttccttgggactcaagcaaggtaaaacccaagaaggttgcaagaagatgattatgcaagtggatgttgatggtgatggtagagttaattacaaagagtttcttcaaatgatgaaaggtgatgggtttagcagtagtagttga

SEQ ID NO: 6202 - protein, 214 aa, Glycine max
MMRIFLLYHLLNSFLLSLVPKKLRTLFSLSWFDKTLHKNSPPSPSMLPSPSPSSTPTTKIDPSELKRVFQTFDKNGDGRITKQELKDSLENLGIYIPDKDLTQMIHNIDTNHDGCVDIDEFESLYKSIVDEHHNDGETEEEDMKEAFNVFDQDGDGFITVEELKSVMGSLGLKQGKTQEGCKKMIMQVDVDGDGRVNYKEFLQMMKGDGFSSSS

SEQ ID NO: 6203 - DNA, 513 bp, Glycine max
  CDS (1)..(513)
atgtcatctttatatagaggggaatccaggaggtacaacaataaaccaagaggacgtcataatttgacaacgcagaagaagcaagagattaaggaagcctttgagttatttgatactgatggctcaggtactattgatgccaaggagctgaatgttgctatgagggcccttggatttgagatgacagaagagcaaatcaatcaaatgatagcagatgtggacaaggatggaagtggagcaattgattatgacgaatttgagtacatgatgacagccaaaataggagaaagggacactaaagaggagctcatgaaagctttccatattattgatcatgataaaaatggaaagatatccgcattagacatcaagcgcattgcaaaagagctaggtcaaaatttcactgacagagagattcaggagatggttgaggaagcagaccaagataatgatcgagaggttagtgcggaggagttcatcacgatgatgaacagaactcgcttccatcactag

SEQ ID NO: 6204 - protein, 170 aa, Glycine max
MSSLYRGESRRYNNKPRGRHNLTTQKKQEIKEAFELFDTDGSGTIDAKELNVAMRALGFEMTEEQINQMIADVDKDGSGAIDYDEFEYMMTAKIGERDTKEELMKAFHIIDHDKNGKISALDIKRIAKELGQNFTDREIQEMVEEADQDNDREVSAEEFITMMNRTRFHH

SEQ ID NO: 6205 - DNA, 456 bp, Oryza sativa
  CDS (1)..(456)
atggttgttgcatcagcagcatcgccgtgcgagtccagtgcgttgttcgcgacgttcgaccacgacggcgacggcaggatctccgcggcggagctgcggctgtgcatgaagacgacgctcggggaggaggtgtcggacgaggaggcggggcagctggtggcgtcggtggacgcggacggcgacgggctgctgtgcgaggcggagttcgtgcggctggtgcaggcggcggaggtggaggaggaagacgagcggcggggcaccggcctccgggaggcgttcggcatgtacgagatggaaggggaagggtgcatcacgccgacgagcctcaggcggatgctgcgccggctgggctccgaccaggacatcgacgactgccgcgccatgatctgcaggttcgatctcaacggcgacggcgtcctcagcttcgacgagttcaagatcatgatgaacgcctaa

SEQ ID NO: 6206 - protein, 151 aa, Oryza sativa
MVVASAASPCESSALFATFDHDGDGRISAAELRLCMKTTLGEEVSDEEAGQLVASVDADGDGLLCEAEFVRLVQAAEVEEEDERRGTGLREAFGMYEMEGEGCITPTSLRRMLRRLGSDQDIDDCRAMICRFDLNGDGVLSFDEFKIMMNA

SEQ ID NO: 6207 - DNA, 8585 bp, Artificial
  plasmid VC-MME301-1QCZ
agcttggacaatcagtaaattgaacggagaatattattcataaaaatacgatagtaacgggtgatatattcattagaatgaaccgaaaccggcggtaaggatctgagctacacatgctcaggttttttacaacgtgcacaacagaattgaaagcaaatatcatgcgatcataggcgtctcgcatatctcattaaagcagggcatgccggtcgagtcaaatctcggtgacgggcaggaccggacggggcggtaccggcaggctgaagtccagctgccagaaacccacgtcatgccagttcccgtgcttgaagccggccgcccgcagcatgccgcggggggcatatccgagcgcctcgtgcatgcgcacgctcgggtcgttgggcagcccgatgacagcgaccacgctcttgaagccctgtgcctccagggacttcagcaggtgggtgtagagcgtggagcccagtcccgtccgctggtggcggggggagacgtacacggtcgactcggccgtccagtcgtaggcgttgcgtgccttccaggggcccgcgtaggcgatgccggcgacctcgccgtccacctcggcgacgagccagggatagcgctcccgcagacggacgaggtcgtccgtccactcctgcggttcctgcggctcggtacggaagttgaccgtgcttgtctcgatgtagtggttgacgatggtgcagaccgccggcatgtccgcctcggtggcacggcggatgtcggccgggcgtcgttctgggctcatggtagactcgacggatccacgtgtggaagatatgaatttttttgagaaactagataagattaatgaatatcggtgttttggttttttcttgtggccgtctttgtttatattgagatttttcaaatcagtgcgcaagacgtgacgtaagtatccgagtcagtttttatttttctactaatttggtcgaagctttgggcggatcctctagactgcagcaaatttacacattgccactaaacgtctaaacccttgtaatttgtttttgttttactatgtgtgttatgtatttgatttgcgataaatttttatatttggtactaaatttataacaccttttatgctaacgtttgccaacacttagcaatttgcaagttgattaattgattctaaattatttttgtcttctaaatacatatactaatcaactggaaatgtaaatatttgctaatatttctactataggagaattaaagtgagtgaatatggtaccacaaggtttggagatttaattgttgcaatgctgcatggatggcatatacaccaaacattcaataattcttgaggataataatggtaccacacaagatttgaggtgcatgaacgtcacgtggacaaaaggtttagtaatttttcaagacaacaatgttaccacacacaagttttgaggtgcatgcatggatgccctgtggaaagtttaaaaatattttggaaatgatttgcatggaagccatgtgtaaaaccatgacatccacttggaggatgcaataatgaagaaaactacaaatttacatgcaactagttatgcatgtagtctatataatgaggattttgcaatactttcattcatacacactcactaagttttacacgattataatttcttcataccattaattaagaattccagctgaccaccatggcaattcccggggatcagctcgaatttccccgatcgttcaaacatttggcaataaagtttcttaagattgaatcctgttgccggtcttgcgatgattatcatataatttctgttgaattacgttaagcatgtaataattaacatgtaatgcatgacgttatttatgagatgggtttttatgattagagtcccgcaattatacatttaatacgcgatagaaaacaaaatatagcgcgcaaactaggataaattatcgcgcgcggtgtcatctatgttactagatcgggaattggcatgcaagcttggcactggccgtcgttttacaacgtcgtgactgggaaaaccctggcgttacccaacttaatcgccttgcagcacatccccctttcgccagctggcgtaatagcgaagaggcccgcaccgatcgcccttcccaacagttgcgcagcctgaatggcgaatgctagagcagcttgagcttggatcagattgtcgtttcccgccttcagtttaaactatcagtgtttgacaggatatattggcgggtaaacctaagagaaaagagcgtttattagaataatcggatatttaaaagggcgtgaaaaggtttatccgttcgtccatttgtatgtgcatgccaaccacagggttcccctcgggatcaaagtactttgatccaacccctccgctgctatagtgcagtcggcttctgacgttcagtgcagccgtcttctgaaaacgacatgtcgcacaagtcctaagttacgcgacaggctgccgccctgcccttttcctggcgttttcttgtcgcgtgttttagtcgcataaagtagaatacttgcgactagaaccggagacattacgccatgaacaagagcgccgccgctggcctgctgggctatgcccgcgtcagcaccgacgaccaggacttgaccaaccaacgggccgaactgcacgcggccggctgcaccaagctgttttccgagaagatcaccggcaccaggcgcgaccgcccggagctggccaggatgcttgaccacctacgccctggcgacgttgtgacagtgaccaggctagaccgcctggcccgcagcacccgcgacctactggacattgccgagcgcatccaggaggccggcgcgggcctgcgtagcctggcagagccgtgggccgacaccaccacgccggccggccgcatggtgttgaccgtgttcgccggcattgccgagttcgagcgttccctaatcatcgaccgcacccggagcgggcgcgaggccgccaaggcccgaggcgtgaagtttggcccccgccctaccctcaccccggcacagatcgcgcacgcccgcgagctgatcgaccaggaaggccgcaccgtgaaagaggcggctgcactgcttggcgtgcatcgctcgaccctgtaccgcgcacttgagcgcagcgaggaagtgacgcccaccgaggccaggcggcgcggtgccttccgtgaggacgcattgaccgaggccgacgccctggcggccgccgagaatgaacgccaagaggaacaagcatgaaaccgcaccaggacggccaggacgaaccgtttttcattaccgaagagatcgaggcggagatgatcgcggccgggtacgtgttcgagccgcccgcgcacgtctcaaccgtgcggctgcatgaaatcctggccggtttgtctgatgccaagctggcggcctggccggccagcttggccgctgaagaaaccgagcgccgccgtctaaaaaggtgatgtgtatttgagtaaaacagcttgcgtcatgcggtcgctgcgtatatgatgcgatgagtaaataaacaaatacgcaaggggaacgcatgaaggttatcgctgtacttaaccagaaaggcgggtcaggcaagacgaccatcgcaacccatctagcccgcgccctgcaactcgccggggccgatgttctgttagtcgattccgatccccagggcagtgcccgcgattgggcggccgtgcgggaagatcaaccgctaaccgttgtcggcatcgaccgcccgacgattgaccgcgacgtgaaggccatcggccggcgcgacttcgtagtgatcgacggagcgccccaggcggcggacttggctgtgtccgcgatcaaggcagccgacttcgtgctgattccggtgcagccaagcccttacgacatatgggccaccgccgacctggtggagctggttaagcagcgcattgaggtcacggatggaaggctacaagcggcctttgtcgtgtcgcgggcgatcaaaggcacgcgcatcggcggtgaggttgccgaggcgctggccgggtacgagctgcccattcttgagtcccgtatcacgcagcgcgtgagctacccaggcactgccgccgccggcacaaccgttcttgaatcagaacccgagggcgacgctgcccgcgaggtccaggcgctggccgctgaaattaaatcaaaactcatttgagttaatgaggtaaagagaaaatgagcaaaagcacaaacacgctaagtgccggccgtccgagcgcacgcagcagcaaggctgcaacgttggccagcctggcagacacgccagccatgaagcgggtcaactttcagttgccggcggaggatcacaccaagctgaagatgtacgcggtacgccaaggcaagaccattaccgagctgctatctgaatacatcgcgcagctaccagagtaaatgagcaaatgaataaatgagtagatgaattttagcggctaaaggaggcggcatggaaaatcaagaacaaccaggcaccgacgccgtggaatgccccatgtgtggaggaacgggcggttggccaggcgtaagcggctgggttgcctgccggccctgcaatggcactggaacccccaagcccgaggaatcggcgtgagcggtcgcaaaccatccggcccggtacaaatcggcgcggcgctgggtgatgacctggtggagaagttgaaggccgcgcaggccgcccagcggcaacgcatcgaggcagaagcacgccccggtgaatcgtggcaagcggccgctgatcgaatccgcaaagaatcccggcaaccgccggcagccggtgcgccgtcgattaggaagccgcccaagggcgacgagcaaccagattttttcgttccgatgctctatgacgtgggcacccgcgatagtcgcagcatcatggacgtggccgttttccgtctgtcgaagcgtgaccgacgagctggcgaggtgatccgctacgagcttccagacgggcacgtagaggtttccgcagggccggccggcatggccagtgtgtgggattacgacctggtactgatggcggtttcccatctaaccgaatccatgaaccgataccgggaagggaagggagacaagcccggccgcgtgttccgtccacacgttgcggacgtactcaagttctgccggcgagccgatggcggaaagcagaaagacgacctggtagaaacctgcattcggttaaacaccacgcacgttgccatgcagcgtacgaagaaggccaagaacggccgcctggtgacggtatccgagggtgaagccttgattagccgctacaagatcgtaaagagcgaaaccgggcggccggagtacatcgagatcgagctagctgattggatgtaccgcgagatcacagaaggcaagaacccggacgtgctgacggttcaccccgattactttttgatcgatcccggcatcggccgttttctctaccgcctggcacgccgcgccgcaggcaaggcagaagccagatggttgttcaagacgatctacgaacgcagtggcagcgccggagagttcaagaagttctgtttcaccgtgcgcaagctgatcgggtcaaatgacctgccggagtacgatttgaaggaggaggcggggcaggctggcccgatcctagtcatgcgctaccgcaacctgatcgagggcgaagcatccgccggttcctaatgtacggagcagatgctagggcaaattgccctagcaggggaaaaaggtcgaaaaggtctctttcctgtggatagcacgtacattgggaacccaaagccgtacattgggaaccggaacccgtacattgggaacccaaagccgtacattgggaaccggtcacacatgtaagtgactgatataaaagagaaaaaaggcgatttttccgcctaaaactctttaaaacttattaaaactcttaaaacccgcctggcctgtgcataactgtctggccagcgcacagccgaagagctgcaaaaagcgcctacccttcggtcgctgcgctccctacgccccgccgcttcgcgtcggcctatcgcggccgctggccgctcaaaaatggctggcctacggccaggcaatctaccagggcgcggacaagccgcgccgtcgccactcgaccgccggcgcccacatcaaggcaccctgcctcgcgcgtttcggtgatgacggtgaaaacctctgacacatgcagctcccggagacggtcacagcttgtctgtaagcggatgccgggagcagacaagcccgtcagggcgcgtcagcgggtgttggcgggtgtcggggcgcagccatgacccagtcacgtagcgatagcggagtgtatactggcttaactatgcggcatcagagcagattgtactgagagtgcaccatatgcggtgtgaaataccgcacagatgcgtaaggagaaaataccgcatcaggcgctcttccgcttcctcgctcactgactcgctgcgctcggtcgttcggctgcggcgagcggtatcagctcactcaaaggcggtaatacggttatccacagaatcaggggataacgcaggaaagaacatgtgagcaaaaggccagcaaaaggccaggaaccgtaaaaaggccgcgttgctggcgtttttccataggctccgcccccctgacgagcatcacaaaaatcgacgctcaagtcagaggtggcgaaacccgacaggactataaagataccaggcgtttccccctggaagctccctcgtgcgctctcctgttccgaccctgccgcttaccggatacctgtccgcctttctcccttcgggaagcgtggcgctttctcatagctcacgctgtaggtatctcagttcggtgtaggtcgttcgctccaagctgggctgtgtgcacgaaccccccgttcagcccgaccgctgcgccttatccggtaactatcgtcttgagtccaacccggtaagacacgacttatcgccactggcagcagccactggtaacaggattagcagagcgaggtatgtaggcggtgctacagagttcttgaagtggtggcctaactacggctacactagaaggacagtatttggtatctgcgctctgctgaagccagttaccttcggaaaaagagttggtagctcttgatccggcaaacaaaccaccgctggtagcggtggtttttttgtttgcaagcagcagattacgcgcagaaaaaaaggatctcaagaagatcctttgatcttttctacggggtctgacgctcagtggaacgaaaactcacgttaagggattttggtcatgcattctaggtactaaaacaattcatccagtaaaatataatattttattttctcccaatcaggcttgatccccagtaagtcaaaaaatagctcgacatactgttcttccccgatatcctccctgatcgaccggacgcagaaggcaatgtcataccacttgtccgccctgccgcttctcccaagatcaataaagccacttactttgccatctttcacaaagatgttgctgtctcccaggtcgccgtgggaaaagacaagttcctcttcgggcttttccgtctttaaaaaatcatacagctcgcgcggatctttaaatggagtgtcttcttcccagttttcgcaatccacatcggccagatcgttattcagtaagtaatccaattcggctaagcggctgtctaagctattcgtatagggacaatccgatatgtcgatggagtgaaagagcctgatgcactccgcatacagctcgataatcttttcagggctttgttcatcttcatactcttccgagcaaaggacgccatcggcctcactcatgagcagattgctccagccatcatgccgttcaaagtgcaggacctttggaacaggcagctttccttccagccatagcatcatgtccttttcccgttccacatcataggtggtccctttataccggctgtccgtcatttttaaatataggttttcattttctcccaccagcttatataccttagcaggagacattccttccgtatcttttacgcagcggtatttttcgatcagttttttcaattccggtgatattctcattttagccatttattatttccttcctcttttctacagtatttaaagataccccaagaagctaattataacaagacgaactccaattcactgttccttgcattctaaaaccttaaataccagaaaacagctttttcaaagttgttttcaaagttggcgtataacatagtatcgacggagccgattttgaaaccgcggtgatcacaggcagcaacgctctgtcatcgttacaatcaacatgctaccctccgcgagatcatccgtgtttcaaacccggcagcttagttgccgttcttccgaatagcatcggtaacatgagcaaagtctgccgccttacaacggctctcccgctgacgccgtcccggactgatgggctgcctgtatcgagtggtgattttgtgccgagctgccggtcggggagctgttggctggctggtggcaggatatattgtggtgtaaacaaattgacgcttagacaacttaataacacattgcggacgtttttaatgtactgaattaacgccgaatta

SEQ ID NO: 6208 - DNA, 8588 bp, Artificial
  plasmid VC-MME289-1qcz
gctttgggcggatcctctagaggacaatcagtaaattgaacggagaatattattcataaaaatacgatagtaacgggtgatatattcattagaatgaaccgaaaccggcggtaaggatctgagctacacatgctcaggttttttacaacgtgcacaacagaattgaaagcaaatatcatgcgatcataggcgtctcgcatatctcattaaagcagggcatgccggtcgagtcaaatctcggtgacgggcaggaccggacggggcggtaccggcaggctgaagtccagctgccagaaacccacgtcatgccagttcccgtgcttgaagccggccgcccgcagcatgccgcggggggcatatccgagcgcctcgtgcatgcgcacgctcgggtcgttgggcagcccgatgacagcgaccacgctcttgaagccctgtgcctccagggacttcagcaggtgggtgtagagcgtggagcccagtcccgtccgctggtggcggggggagacgtacacggtcgactcggccgtccagtcgtaggcgttgcgtgccttccaggggcccgcgtaggcgatgccggcgacctcgccgtccacctcggcgacgagccagggatagcgctcccgcagacggacgaggtcgtccgtccactcctgcggttcctgcggctcggtacggaagttgaccgtgcttgtctcgatgtagtggttgacgatggtgcagaccgccggcatgtccgcctcggtggcacggcggatgtcggccgggcgtcgttctgggctcatggtagactcgacggatccacgtgtggaagatatgaatttttttgagaaactagataagattaatgaatatcggtgttttggttttttcttgtggccgtctttgtttatattgagatttttcaaatcagtgcgcaagacgtgacgtaagtatccgagtcagtttttatttttctactaatttggtcgaatctagactgcagcaaatttacacattgccactaaacgtctaaacccttgtaatttgtttttgttttactatgtgtgttatgtatttgatttgcgataaatttttatatttggtactaaatttataacaccttttatgctaacgtttgccaacacttagcaatttgcaagttgattaattgattctaaattatttttgtcttctaaatacatatactaatcaactggaaatgtaaatatttgctaatatttctactataggagaattaaagtgagtgaatatggtaccacaaggtttggagatttaattgttgcaatgctgcatggatggcatatacaccaaacattcaataattcttgaggataataatggtaccacacaagatttgaggtgcatgaacgtcacgtggacaaaaggtttagtaatttttcaagacaacaatgttaccacacacaagttttgaggtgcatgcatggatgccctgtggaaagtttaaaaatattttggaaatgatttgcatggaagccatgtgtaaaaccatgacatccacttggaggatgcaataatgaagaaaactacaaatttacatgcaactagttatgcatgtagtctatataatgaggattttgcaatactttcattcatacacactcactaagttttacacgattataatttcttcatagccacccgggttgctcttccatggcaatgattaattaacgaagagcaagagctcgaatttccccgatcgttcaaacatttggcaataaagtttcttaagattgaatcctgttgccggtcttgcgatgattatcatataatttctgttgaattacgttaagcatgtaataattaacatgtaatgcatgacgttatttatgagatgggtttttatgattagagtcccgcaattatacatttaatacgcgatagaaaacaaaatatagcgcgcaaactaggataaattatcgcgcgcggtgtcatctatgttactagatcgggaattggcatgcaagcttggcactggccgtcgttttacaacgtcgtgactgggaaaaccctggcgttacccaacttaatcgccttgcagcacatccccctttcgccagctggcgtaatagcgaagaggcccgcaccgatcgcccttcccaacagttgcgcagcctgaatggcgaatgctagagcagcttgagcttggatcagattgtcgtttcccgccttcagtttaaactatcagtgtttgacaggatatattggcgggtaaacctaagagaaaagagcgtttattagaataatcggatatttaaaagggcgtgaaaaggtttatccgttcgtccatttgtatgtgcatgccaaccacagggttcccctcgggatcaaagtactttgatccaacccctccgctgctatagtgcagtcggcttctgacgttcagtgcagccgtcttctgaaaacgacatgtcgcacaagtcctaagttacgcgacaggctgccgccctgcccttttcctggcgttttcttgtcgcgtgttttagtcgcataaagtagaatacttgcgactagaaccggagacattacgccatgaacaagagcgccgccgctggcctgctgggctatgcccgcgtcagcaccgacgaccaggacttgaccaaccaacgggccgaactgcacgcggccggctgcaccaagctgttttccgagaagatcaccggcaccaggcgcgaccgcccggagctggccaggatgcttgaccacctacgccctggcgacgttgtgacagtgaccaggctagaccgcctggcccgcagcacccgcgacctactggacattgccgagcgcatccaggaggccggcgcgggcctgcgtagcctggcagagccgtgggccgacaccaccacgccggccggccgcatggtgttgaccgtgttcgccggcattgccgagttcgagcgttccctaatcatcgaccgcacccggagcgggcgcgaggccgccaaggcccgaggcgtgaagtttggcccccgccctaccctcaccccggcacagatcgcgcacgcccgcgagctgatcgaccaggaaggccgcaccgtgaaagaggcggctgcactgcttggcgtgcatcgctcgaccctgtaccgcgcacttgagcgcagcgaggaagtgacgcccaccgaggccaggcggcgcggtgccttccgtgaggacgcattgaccgaggccgacgccctggcggccgccgagaatgaacgccaagaggaacaagcatgaaaccgcaccaggacggccaggacgaaccgtttttcattaccgaagagatcgaggcggagatgatcgcggccgggtacgtgttcgagccgcccgcgcacgtctcaaccgtgcggctgcatgaaatcctggccggtttgtctgatgccaagctggcggcctggccggccagcttggccgctgaagaaaccgagcgccgccgtctaaaaaggtgatgtgtatttgagtaaaacagcttgcgtcatgcggtcgctgcgtatatgatgcgatgagtaaataaacaaatacgcaaggggaacgcatgaaggttatcgctgtacttaaccagaaaggcgggtcaggcaagacgaccatcgcaacccatctagcccgcgccctgcaactcgccggggccgatgttctgttagtcgattccgatccccagggcagtgcccgcgattgggcggccgtgcgggaagatcaaccgctaaccgttgtcggcatcgaccgcccgacgattgaccgcgacgtgaaggccatcggccggcgcgacttcgtagtgatcgacggagcgccccaggcggcggacttggctgtgtccgcgatcaaggcagccgacttcgtgctgattccggtgcagccaagcccttacgacatatgggccaccgccgacctggtggagctggttaagcagcgcattgaggtcacggatggaaggctacaagcggcctttgtcgtgtcgcgggcgatcaaaggcacgcgcatcggcggtgaggttgccgaggcgctggccgggtacgagctgcccattcttgagtcccgtatcacgcagcgcgtgagctacccaggcactgccgccgccggcacaaccgttcttgaatcagaacccgagggcgacgctgcccgcgaggtccaggcgctggccgctgaaattaaatcaaaactcatttgagttaatgaggtaaagagaaaatgagcaaaagcacaaacacgctaagtgccggccgtccgagcgcacgcagcagcaaggctgcaacgttggccagcctggcagacacgccagccatgaagcgggtcaactttcagttgccggcggaggatcacaccaagctgaagatgtacgcggtacgccaaggcaagaccattaccgagctgctatctgaatacatcgcgcagctaccagagtaaatgagcaaatgaataaatgagtagatgaattttagcggctaaaggaggcggcatggaaaatcaagaacaaccaggcaccgacgccgtggaatgccccatgtgtggaggaacgggcggttggccaggcgtaagcggctgggttgcctgccggccctgcaatggcactggaacccccaagcccgaggaatcggcgtgagcggtcgcaaaccatccggcccggtacaaatcggcgcggcgctgggtgatgacctggtggagaagttgaaggccgcgcaggccgcccagcggcaacgcatcgaggcagaagcacgccccggtgaatcgtggcaagcggccgctgatcgaatccgcaaagaatcccggcaaccgccggcagccggtgcgccgtcgattaggaagccgcccaagggcgacgagcaaccagattttttcgttccgatgctctatgacgtgggcacccgcgatagtcgcagcatcatggacgtggccgttttccgtctgtcgaagcgtgaccgacgagctggcgaggtgatccgctacgagcttccagacgggcacgtagaggtttccgcagggccggccggcatggccagtgtgtgggattacgacctggtactgatggcggtttcccatctaaccgaatccatgaaccgataccgggaagggaagggagacaagcccggccgcgtgttccgtccacacgttgcggacgtactcaagttctgccggcgagccgatggcggaaagcagaaagacgacctggtagaaacctgcattcggttaaacaccacgcacgttgccatgcagcgtacgaagaaggccaagaacggccgcctggtgacggtatccgagggtgaagccttgattagccgctacaagatcgtaaagagcgaaaccgggcggccggagtacatcgagatcgagctagctgattggatgtaccgcgagatcacagaaggcaagaacccggacgtgctgacggttcaccccgattactttttgatcgatcccggcatcggccgttttctctaccgcctggcacgccgcgccgcaggcaaggcagaagccagatggttgttcaagacgatctacgaacgcagtggcagcgccggagagttcaagaagttctgtttcaccgtgcgcaagctgatcgggtcaaatgacctgccggagtacgatttgaaggaggaggcggggcaggctggcccgatcctagtcatgcgctaccgcaacctgatcgagggcgaagcatccgccggttcctaatgtacggagcagatgctagggcaaattgccctagcaggggaaaaaggtcgaaaaggtctctttcctgtggatagcacgtacattgggaacccaaagccgtacattgggaaccggaacccgtacattgggaacccaaagccgtacattgggaaccggtcacacatgtaagtgactgatataaaagagaaaaaaggcgatttttccgcctaaaactctttaaaacttattaaaactcttaaaacccgcctggcctgtgcataactgtctggccagcgcacagccgaagagctgcaaaaagcgcctacccttcggtcgctgcgctccctacgccccgccgcttcgcgtcggcctatcgcggccgctggccgctcaaaaatggctggcctacggccaggcaatctaccagggcgcggacaagccgcgccgtcgccactcgaccgccggcgcccacatcaaggcaccctgcctcgcgcgtttcggtgatgacggtgaaaacctctgacacatgcagctcccggagacggtcacagcttgtctgtaagcggatgccgggagcagacaagcccgtcagggcgcgtcagcgggtgttggcgggtgtcggggcgcagccatgacccagtcacgtagcgatagcggagtgtatactggcttaactatgcggcatcagagcagattgtactgagagtgcaccatatgcggtgtgaaataccgcacagatgcgtaaggagaaaataccgcatcaggcgctcttccgcttcctcgctcactgactcgctgcgctcggtcgttcggctgcggcgagcggtatcagctcactcaaaggcggtaatacggttatccacagaatcaggggataacgcaggaaagaacatgtgagcaaaaggccagcaaaaggccaggaaccgtaaaaaggccgcgttgctggcgtttttccataggctccgcccccctgacgagcatcacaaaaatcgacgctcaagtcagaggtggcgaaacccgacaggactataaagataccaggcgtttccccctggaagctccctcgtgcgctctcctgttccgaccctgccgcttaccggatacctgtccgcctttctcccttcgggaagcgtggcgctttctcatagctcacgctgtaggtatctcagttcggtgtaggtcgttcgctccaagctgggctgtgtgcacgaaccccccgttcagcccgaccgctgcgccttatccggtaactatcgtcttgagtccaacccggtaagacacgacttatcgccactggcagcagccactggtaacaggattagcagagcgaggtatgtaggcggtgctacagagttcttgaagtggtggcctaactacggctacactagaaggacagtatttggtatctgcgctctgctgaagccagttaccttcggaaaaagagttggtagctcttgatccggcaaacaaaccaccgctggtagcggtggtttttttgtttgcaagcagcagattacgcgcagaaaaaaaggatctcaagaagatcctttgatcttttctacggggtctgacgctcagtggaacgaaaactcacgttaagggattttggtcatgcattctaggtactaaaacaattcatccagtaaaatataatattttattttctcccaatcaggcttgatccccagtaagtcaaaaaatagctcgacatactgttcttccccgatatcctccctgatcgaccggacgcagaaggcaatgtcataccacttgtccgccctgccgcttctcccaagatcaataaagccacttactttgccatctttcacaaagatgttgctgtctcccaggtcgccgtgggaaaagacaagttcctcttcgggcttttccgtctttaaaaaatcatacagctcgcgcggatctttaaatggagtgtcttcttcccagttttcgcaatccacatcggccagatcgttattcagtaagtaatccaattcggctaagcggctgtctaagctattcgtatagggacaatccgatatgtcgatggagtgaaagagcctgatgcactccgcatacagctcgataatcttttcagggctttgttcatcttcatactcttccgagcaaaggacgccatcggcctcactcatgagcagattgctccagccatcatgccgttcaaagtgcaggacctttggaacaggcagctttccttccagccatagcatcatgtccttttcccgttccacatcataggtggtccctttataccggctgtccgtcatttttaaatataggttttcattttctcccaccagcttatataccttagcaggagacattccttccgtatcttttacgcagcggtatttttcgatcagttttttcaattccggtgatattctcattttagccatttattatttccttcctcttttctacagtatttaaagataccccaagaagctaattataacaagacgaactccaattcactgttccttgcattctaaaaccttaaataccagaaaacagctttttcaaagttgttttcaaagttggcgtataacatagtatcgacggagccgattttgaaaccgcggtgatcacaggcagcaacgctctgtcatcgttacaatcaacatgctaccctccgcgagatcatccgtgtttcaaacccggcagcttagttgccgttcttccgaatagcatcggtaacatgagcaaagtctgccgccttacaacggctctcccgctgacgccgtcccggactgatgggctgcctgtatcgagtggtgattttgtgccgagctgccggtcggggagctgttggctggctggtggcaggatatattgtggtgtaaacaaattgacgcttagacaacttaataacacattgcggacgtttttaatgtactgaattaacgccgaattaa
